(19) United States
(12) Patent Application Publication
(10) Pub. No.: US 2022/0096546 A1
(43) Pub. Date: Mar. 31, 2022

(54) Modified Cell Expansion and Uses Thereof

(71) Applicant: Innovative Cellular Therapeutics Holdings, Ltd., Grand Cayman (KY)

(72) Inventors: Lei Xiao, Rockville, MD (US); Chengfei Pu, Shanghai (CN); Zhiyuan Cao, Shanghai (CN)

(73) Assignee: Innovative Cellular Therapeutics Holdings, Ltd., Grand Cayman (KY)

(21) Appl. No.: 17/420,066

(22) PCT Filed: Jan. 10, 2020
(86) PCT No.: PCT/US2020/013099

§ 371 Date: Jun. 30, 2021

Related U.S. Application Data
(63) Continuation of application No. 16/445,965, filed on Jun. 19, 2019, now Pat. No. 10,918,667.
Application No. 16/445,965 is a continuation of application No. 16/387,166, filed on Apr. 17, 2019, now Pat. No. 10,869,888.
(60) Provisional application No. 62/932,587, filed on Nov. 8, 2019.
(60) Provisional application No. 62/902,766, filed on Sep. 19, 2019.
(60) Provisional application No. 62/891,131, filed on Aug. 23, 2019.
(60) Provisional application No. 62/889,926, filed on Aug. 21, 2019.
(60) Provisional application No. 62/848,961, filed on May 16, 2019.
(60) Provisional application No. 62/846,563, filed on May 10, 2019.
(60) Provisional application No. 62/817,322, filed on Mar. 12, 2019.
(60) Provisional application No. 62/816,497, filed on Mar. 11, 2019.
(60) Provisional application No. 62/799,462, filed on Jan. 31, 2019.
(60) Provisional application No. 62/790,783, filed on Jan. 10, 2019.

(51) Int. Cl. A61K 35/17; C07K 14/54; C07K 14/57; C07K 14/705; C07K 14/725; C07K 16/28

(52) U.S. Cl. CPC A61K 35/17; C07K 14/5412; C07K 14/57; C07K 14/70521; C07K 14/7051; A61K 2039/505; C07K 16/2803; C07K 2317/622; C07K 2319/33; C07K 2319/30; C07K 2319/03; C07K 14/70578

(57) ABSTRACT

The present disclosure relates to compositions and methods for enhancing T cell response and/or CAR cell expansion and/or maintenance in vivo and/or in vitro. For example, a method of enhancing T cell-based therapy comprises administering a mixed population of T cells comprising modified T cells comprising a first chimeric antigen receptor (CAR) and modified T cells comprising a second CAR, wherein a binding domain of the first CAR binds a first antigen, and a binding domain of the second CAR binds a second antigen. The first antigen is different from the second antigen. In embodiments, the first CAR binds a surface molecule or antigen of a white blood cell.

### CROSS REFERENCE TO RELATED PATENT APPLICATIONS

[0001] This application is a continuation-in-part of U.S. application Ser. No. 16/445,965, filed Jun. 19, 2019; and U.S. application Ser. No. 16/387,166, filed Apr. 17, 2019. This application also claims the benefit of U.S. Provisional Application 62/932,587, filed Nov. 8, 2019; U.S. Provisional Application 62/902,766, filed Sep. 19, 2019; U.S. Provisional Application 62/891,131, filed Aug. 23, 2019; U.S. Provisional Application 62/889,926, filed Aug. 21, 2019; U.S. Provisional Application 62/848,961, filed May 16, 2019; U.S. Provisional Application 62/846,563, filed May 10, 2019; U.S. Provisional Application 62/817,322, filed Mar. 12, 2019; U.S. Provisional Application 62/816,497, filed Mar. 11, 2019; U.S. Provisional Application 62/799,462, filed Jan. 31, 2019; and U.S. Provisional Application 62/790,783, filed Jan. 10, 2019; which are hereby incorporated by reference in their entirety.

### SEQUENCE LISTING INFORMATION

[0002] A computer readable textfile, entitled “Sequence Listing_ST25.txt,” created on or about Jan. 6, 2020 with a file size of about 1.20 MB, contains the sequence listing for this application and is hereby incorporated by reference in its entirety.

### TECHNICAL FIELD

[0003] The present disclosure relates to compositions and methods for expanding and maintaining modified cells including genetically modified cells, and uses thereof in the treatment of diseases, including cancer.

### BACKGROUND

[0004] Chimeric Antigen Receptor (CAR) T cell therapy has achieved good clinical efficacy in cancer such as B-cell acute lymphoblastic leukemia (B-ALL), chronic lymphocytic leukemia (CLL), and lymphoma. However, progress is relatively slow for treatment of solid tumors. For CAR T cell therapy to be effective, long-term maintenance of CAR T cells in a patient is important for the prognosis of the patient in the treatment of tumors. For example, if the long-term presence of CAR T cells can be maintained, this technology may effectively reduce tumor recurrence.

[0005] Cancer is known as malignant tumors involving abnormal cell growth with the potential to invade or spread to other parts of the body. In humans, there are more than one hundred types of cancer. One example is breast cancer occurring in the epithelial tissue of the breast. Since breast cancer cells lose the characteristics of normal cells, the connection between breast cancer cells is lost. Once cancer cells are exfoliated, they spread over the entire body via the blood and/or lymph systems and therefore become life-threatening. Currently, breast cancer has become one of the common threats to women's physical and mental health. Although immunotherapy (e.g., CAR T) has been proven to be effective for treating some cancers, there is still a need to improve immunotherapy so that it is effective in treating more cancers including those involving solid tumors.

### SUMMARY

[0006] Since a patient can survive the depletion of B cells, B cells of the patient may be used to expand the CAR T cells in the patient using a first antigen binding domain of the CAR T cell. Accordingly, more CAR T cells may be timely expanded in the patient, increasing the potency of CAR T cells. The timely expanded CAR T cells in the patient may increase the chances for the CAR T cells to come in contact with tumor cells, especially solid tumor cells having the antigen that a second CAR binds.

[0007] The present disclosure describes genetically modified cells that include one or more different antigen binding domains. The genetically modified cells can include at least two different antigen binding domains: a first antigen binding domain for expanding and/or maintaining the genetically modified cells, and a second antigen binding domain for killing a target cell, such as a tumor cell. For example, the first antigen binding domain binds a surface marker, such as a cell surface molecule of a white blood cell (WBC), and the second antigen binding domain binds a target antigen of tumor cells. In embodiments, the cell surface molecule is a surface antigen of a WBC. A CAR can comprise the first or second antigen binding domain. The modified cells comprise the first and second antigen binding domains. In embodiments, the modified cells comprise modified cells comprising (1) a first group of modified cells comprising the first antigen binding domain and (2) a second group of modified cells comprising the second binding domain. In embodiments, the modified cells are a mixed population comprising two different groups of modified cells

[0008] The CAR can be a bispecific CAR. For example, the two antigen binding domains are on the same CAR (a bispecific CAR or tandem CAR (tanCAR)), on different CAR molecules, or on a CAR and T cell receptor (TCR). A single CAR can include at least two different antigen binding domains, or the two different antigen binding domains are each on a separate CAR.

[0009] The present disclosure also describes one or more nucleic acids encoding a first CAR molecule and a second CAR molecule or a TCR. The first CAR includes the first antigen binding domain and the second CAR or TCR includes the second antigen binding domain. In embodiments, the first CAR and the second CAR or TCR are expressed as separate polypeptides and encoded by at least two separate nucleic acids. In embodiments, a single CAR contains at least the first and second antigen binding domains described herein and is encoded by a single nucleic acid. In embodiments, the two different antigen binding domains can be encoded by more than one nucleic acids. Moreover, the present disclosure describes vectors containing the nucleic acids described herein and cells comprising the nucleic acids described herein. In embodiments, the cells include genetically modified cells, for example genetically modified T cells, such as CAR T cells.

[0010] The present disclosure also describes a population of modified cells, such as a mixed population of modified T cells, effective for expanding and/or maintaining the genetically modified cells in a patient. In embodiments, the mixed population of genetically modified cells includes at least two different genetically modified cells, a first genetically modified cell expressing an antigen binding domain for expanding and/or maintaining the modified cells and a second genetically modified cell expressing an antigen binding domain for killing a target cell, such as a tumor cell. The two antigen binding domains are different molecules and bind different antigens. In embodiments, the mixed population of genetically modified cells further includes a third genetically modified cell expressing at least two different antigen binding domains, a first antigen binding domain for expanding and/or maintaining the genetically modified cell and a second antigen binding domain for killing a target cell (wherein the two different antigen binding domains are expressed on the same cell).

[0011] In embodiments, the mixed population of modified cells includes genetically modified cells expressing at least two different antigen binding domains, a first antigen binding domain for expanding and/or maintaining the modified cells and a second antigen binding domain for killing a target cell (wherein the two different antigen binding domains are expressed on the same cell).

[0012] In embodiments, the mixed population of modified cells includes a modified cell expressing an antigen binding domain for killing a target cell and a modified cell expressing at least two antigen binding domains, a first antigen binding domain for expanding and/or maintaining the modified T cells and a second antigen binding domain for killing a target cell (wherein the two different antigen binding domains are expressed on the same modified cell).

[0013] In embodiments, the mixed population of modified cells includes a modified cell expressing an antigen binding domain for expanding and/or maintaining the modified T cells and a modified cell expressing at least two antigen binding domains, a first antigen binding domain for expanding and/or maintaining the modified cell and a second antigen binding domain for killing a target cell (wherein the two different antigen binding domains are expressed on the same modified cell).

[0014] The present disclosure describes compositions comprising the mixed population of modified cells described herein.

[0015] In embodiments, the modified cell is a modified T cell, a modified NK cell, a modified macrophage, or a modified dendritic cell. In embodiments, the modified T cell is a CAR T cell. In embodiments, the modified cell expressing two different antigen binding domains can be a single CAR T cell. In embodiments, the single CAR T cell can be a bispecific CAR T cell.

[0016] In embodiments, the antigen binding domain for expanding and/or maintaining the modified cell binds the surface antigen of a WBC, and the antigen binding domain for killing a target cell binds a tumor antigen. In embodiments, the WBC is a B cell. In embodiments, the surface antigen of a B cell is CD19, and the tumor antigen is tMUC1, TSHR, GUCY2C, ACPP, CLDN18.2 (18.2), PSMA, UPK2, or other tumor antigens.

[0017] Furthermore, the present disclosure describes the use of the composition or the mixed population of modified cells described herein for enhancing expansion and/or maintenance of CAR T cells in patients in need thereof. The enhanced expansion and maintenance of CAR T cells improves the efficacy of the CAR T cell therapy. The present disclosure describes a method of treating a patient having tumor with a mixed population of modified cells described herein. In embodiments, the mixed population of genetically modified cells expands and/or maintains the modified cells in the patient and effectively inhibits the growth of the tumor. In embodiments, the tumor is a solid tumor.

[0018] Additionally, the present disclosure describes the release of cytokines in response to the introduction of the mixed population of modified cells.

[0019] This Summary is not intended to identify key features or essential features of the claimed subject matter, nor is it intended to be used to limit the scope of the claimed subject matter.

### BRIEF DESCRIPTION OF THE DRAWINGS

[0020] The Detailed Description is described with reference to the accompanying figures. The use of the same reference numbers in different figures indicates similar or identical items.

[0021] FIG. 1 is a schematic diagram of an exemplary portion of a cell membrane of a modified cell including two CAR molecules.

[0022] FIG. 2 is a schematic diagram showing a mixed population of modified cells including two modified cells having different CAR molecules.

[0023] FIG. 3 is a schematic diagram showing an exemplary portion of a cell membrane comprising a CAR and a TCR molecules.

[0024] FIG. 4 is a schematic diagram showing a mixed population of modified cells including a modified cell comprising a CAR molecule and a modified cell comprising a T cell receptor (TCR).

[0025] FIG. 5 is a schematic diagram showing an exemplary portion of a cell membrane comprising a bispecific CAR molecule.

[0026] FIG. 6 shows cytokine data of peripheral blood samples from mice.

[0027] FIG. 7 shows a design of the bispecific CAR and results of expression assays.

[0028] FIG. 8 shows cytokine release of T cells expressing a bispecific CAR.

[0029] FIG. 9 shows results of co-culturing assay of T cells expressing a bispecific CAR and corresponding target cells.

[0030] FIG. 10 shows another design of bispecific CAR and results of expression assays.

[0031] FIG. 11 shows results of an expression assay of the bispecific CAR used in the assay of FIG. 10.

[0032] FIG. 12 shows schematic diagrams of nucleic acid constructs of CAR molecules.

[0033] FIG. 13 shows expression of the CAR molecules shown in FIG. 12.

[0034] FIG. 14 shows results of IFNγ (IFNg) release of co-culturing CAR T cells with tumor cells.

[0035] FIG. 15 shows flow cytometry results depicting CD137 expression for co-culturing of CAR T cells and tumor cells.

[0036] FIG. 16 shows changes in CAR copy number of patients with respect to days after infusion of T cells expressing a single CAR (tMUC1 CAR or TSHR CAR).

[0037] FIG. 17 shows changes in CAR copy number of patients with respect to days after infusion of T cells expressing tMUC1 CAR and CD19 CAR.

[0038] FIG. 18 shows changes in CAR T cell number of a patient with respect to days after infusion of T cells expressing tMUC1 CAR.

[0039] FIG. 19 shows changes in CAR T cell number of a patient with respect to days after infusion of mixed population of CAR T cells expressing tMUC1 CAR and CD19 CAR.

[0040] FIGS. 20 and 21 show changes in CAR T cell number of several patients with respect to days after infusion of mixed CAR T cells expressing MUC1 CAR and CD19 CAR.

[0041] FIGS. 22, 23, 24, 25, 26, 27, 28, 29, 30, 31, and 32 show results of various assays for patients in response to infusion of mixed CAR T cells.

[0042] FIGS. 33, 34, and 35 show CT and/or PET CT scanning images of patients before and after the infusion of mixed CAR T cells.

[0043] FIG. 36 shows results of flow cytometry analysis of CD19 CAR T cells co-cultured with tMUC1 CAR T cells in the presence or the absence of K19 cells.

[0044] FIG. 37 shows the activation of PBMC and monocytes in the cell cultures used in the assay of FIG. 36.

[0045] FIG. 38 shows IFNγ release by tMUC1 CAR T cells and CD19 CAR T cells.

[0046] FIG. 39 shows GZMB release by tMUC1CAR T cells and CD19 CAR T cells.

[0047] FIGS. 40 and 41 show proliferation of MUC1CAR T cells in various embodiments.

[0048] FIG. 42 shows proliferation of CD19 CAR T cells in various embodiments.

[0049] FIG. 43 shows cytokine releases in embodiments.

[0050] FIG. 44 shows CD137 expression in various cell cultures.

[0051] FIG. 45 shows results of flow cytometry analysis of cell activation.

[0052] FIG. 46 shows the activation of PBMC and monocyte in the cell cultures described in FIG. 44.

[0053] FIG. 47 shows that activation of CD19 CAR T cells causes ACPP CAR T cells to release intracellular IFNγ.

[0054] FIGS. 48 and 49 show cytokine releases after cells are co-cultured for 24 hours (hrs) in cell cultures.

[0055] FIG. 50 shows CD137 expression in various cell cultures.

[0056] FIG. 51 shows results of flow cytometry analysis of various CAR T cells co-cultured with KATO3+ cells for 48 hours.

[0057] FIG. 52 shows the activation of PBMC and monocyte in the systems described in FIG. 50.

[0058] FIGS. 53 and 54 show activation of CLDN18.2 CAR T cells causes CD19 CAR T cells to release intracellular IFNγ.

[0059] FIG. 55 shows results of killing assays of various cell cultures.

[0060] FIG. 56 shows proliferation of CLDN18.2 CAR T cells.

[0061] FIG. 57 shows proliferation of CD19 CAR T cells in CLDN18.2 CAR and CD19 CAR systems.

[0062] FIGS. 58, 59, and 60 show cytokine release in various cell cultures.

[0063] FIG. 61 shows a schematic overview of an immunotherapeutic system.

[0064] FIG. 62 shows a schematic overview of an implementation of the immunotherapeutic system in FIG. 61.

[0065] FIG. 63 shows a schematic overview of another implementation of the immunotherapeutic system in FIG. 61.

[0066] FIG. 64 is a schematic diagram of exemplary conditional gene expression systems.

[0067] FIG. 65 is a schematic diagram of exemplary implementations of dendritic cell activation.

[0068] FIG. 66 shows expression of several markers on CAR T cells and TanCAR T cells using flow cytometry analysis.

[0069] FIG. 67 shows cytokine release of CAR T cells and TanCAR T cells.

[0070] FIG. 68 shows the expansion of cells in each group after 5 days of stimulation with the corresponding substrate cells.

[0071] FIG. 69 shows results of killing assay indicating that 6917 inhibited MCF-7 and 6921 inhibited PC3-ACPP.

[0072] FIG. 70 shows expression of several markers on CAR T cells and TanCAR T cells and the cytokine release of CAR T cells and TanCAR T cells measured using flow cytometry analysis.

[0073] FIG. 71 shows cytokine release of various CAR T cells and TanCAR T cells in response to substrate cells.

[0074] FIG. 72 shows PDL1 expression of monocytes in Patient 009.

[0075] FIGS. 73, 74, and 75 show expansion of CAR T cell in Patient 011 in response to infusion of modified T cells.

[0076] FIG. 76 shows cytokine release in Patient 011 in response to infusion of modified T cells.

[0077] FIGS. 77A and B illustrate exemplary structures of binding molecules.

[0078] FIG. 78 illustrates the determination of phenotype and expression of a gene of interest using flow cytometry.

[0079] FIG. 79 shows the identification of co-cultured cells using flow cytometry.

[0080] FIG. 80 shows results of flow cytometry analysis on activation of co-cultured cells including CD19 CAR T cells and NYESO-1 TCRTS. Arrows 114 and 116 as well as boxes 102, 104, 106, and 108 refer to comparison groups.

[0081] FIG. 81 show results of flow cytometry analysis on the proliferation of co-cultured cells including CD19 CAR T cells and NYESO-1 TCRTS. Arrow 208 as well as boxes 202, 204, and 206 refer to comparison groups.

[0082] FIG. 82 show results of flow cytometry analysis on activation of co-cultured cells including CD19 CAR T cells and AFP TCRTS. Arrows 314 and 316 as well as boxes 302, 304, 306, and 308 refer to comparison groups.

[0083] FIG. 83 show results of flow cytometry analysis on the proliferation of co-cultured cells including CD19 CAR T cells and AFP TCRTS. Arrow 408 as well as boxes 402, 404, and 406 refer to comparison groups.

[0084] FIG. 84 shows other histograms of CD137 expression in various cell cultures.

[0085] FIG. 85 shows the proliferation of GUCY2C CAR T cells.

[0086] FIG. 86 shows cytokine release after cells were co-cultured for 24 hrs in cell cultures.

[0087] FIGS. 87A-87D illustrate exemplary constructs of polynucleotides encoding recombinant proteins and exemplary structure of antibodies.

### DETAILED DESCRIPTION

[0088] Unless defined otherwise, all technical and scientific terms used herein have the same meaning as commonly understood by those of ordinary skill in the art to which the disclosure belongs. Although any method and material similar or equivalent to those described herein can be used in the practice or testing of the present disclosure, preferred methods and materials are described. For the purposes of the present disclosure, the following terms are defined below.

[0089] The articles “a” and “an” are used herein to refer to one or to more than one (i.e., to at least one) of the grammatical object of the article. By way of example, “an element” means one element or more than one element.

[0090] By “about” is meant a quantity, level, value, number, frequency, percentage, dimension, size, amount, weight or length that varies by as much as 20, 15, 10, 9, 8, 7, 6, 5, 4, 3, 2 or 1% to a reference quantity, level, value, number, frequency, percentage, dimension, size, amount, weight or length.

[0091] The term “activation,” as used herein, refers to the state of a cell that has been sufficiently stimulated to induce detectable cellular proliferation. Activation can also be associated with induced cytokine production and detectable effector functions. The term “activated T cells” refers to, among other things, T cells that are undergoing cell division.

[0092] The term “antibody” is used in the broadest sense and refers to monoclonal antibodies (including full length monoclonal antibodies), polyclonal antibodies, multi-specific antibodies (e.g., bispecific antibodies), and antibody fragments so long as they exhibit the desired biological activity or function. The antibodies in the present disclosure may exist in a variety of forms including, for example, polyclonal antibodies; monoclonal antibodies; Fv, Fab, Fab′, and F(ab′)₂ fragments; as well as single chain antibodies and humanized antibodies (Harlow et al., 1999, In: Using Antibodies: A Laboratory Manual, Cold Spring Harbor Laboratory Press, NY; Harlow et al., 1989, In: Antibodies: A Laboratory Manual, Cold Spring Harbor, N.Y.; Houston et al., 1988, Proc. Natl. Acad. Sci. USA 85:5879-5883; Bird et al., 1988, Science 242:423-426).

[0093] The term “antibody fragments” refers to a portion of a full-length antibody, for example, the antigen binding or variable region of the antibody. Other examples of antibody fragments include Fab, Fab′, F(ab′)₂, and Fv fragments; diabodies; linear antibodies; single-chain antibody molecules; and multi-specific antibodies formed from antibody fragments.

[0094] The term “Fv” refers to the minimum antibody fragment which contains a complete antigen-recognition and -binding site. This fragment consists of a dimer of one heavy- and one light-chain variable region domain in tight, non-covalent association. From the folding of these two domains emanates six hypervariable loops (3 loops each from the H and L chain) that contribute amino acid residues for antigen binding and confer antigen binding specificity to the antibody. However, even a single variable domain (or half of an Fv including only three complementarity determining regions (CDRs) specific for an antigen) has the ability to recognize and bind antigen, although at a lower affinity than the entire binding site (the dimer).

[0095] An “antibody heavy chain,” as used herein, refers to the larger of the two types of polypeptide chains present in all antibody molecules in their naturally occurring conformations. An “antibody light chain,” as used herein, refers to the smaller of the two types of polypeptide chains present in all antibody molecules in their naturally occurring conformations. K and A light chains refer to the two major antibody light chain isotypes.

[0096] The term “synthetic antibody” refers to an antibody which is generated using recombinant DNA technology, such as, for example, an antibody expressed by a bacteriophage. The term also includes an antibody which has been generated by the synthesis of a DNA molecule encoding the antibody and the expression of the DNA molecule to obtain the antibody or to obtain an amino acid encoding the antibody. The synthetic DNA is obtained using technology that is available and well known in the art.

[0097] The term “antigen” refers to a molecule that provokes an immune response, which may involve either antibody production, or the activation of specific immunologically-competent cells, or both. Antigens include any macromolecule, including all proteins or peptides, or molecules derived from recombinant or genomic DNA. For example, DNA including a nucleotide sequence or a partial nucleotide sequence encoding a protein or peptide that elicits an immune response, and therefore, encodes an “antigen” as the term is used herein. An antigen need not be encoded solely by a full-length nucleotide sequence of a gene. An antigen can be generated, synthesized or derived from a biological sample including a tissue sample, a tumor sample, a cell, or a biological fluid.

[0098] The term “anti-tumor effect” as used herein, refers to a biological effect associated with a decrease in tumor volume, a decrease in the number of tumor cells, a decrease in the number of metastases, decrease in tumor cell proliferation, decrease in tumor cell survival, an increase in life expectancy of a subject having tumor cells, or amelioration of various physiological symptoms associated with the cancerous condition. An “anti-tumor effect” can also be manifested by the ability of the peptides, polynucleotides, cells, and antibodies in the prevention of the occurrence of tumor in the first place.

[0099] The term “auto-antigen” refers to an endogenous antigen mistakenly recognized by the immune system as being foreign. Auto-antigens include cellular proteins, phosphoproteins, cellular surface proteins, cellular lipids, nucleic acids, glycoproteins, including cell surface receptors.

[0100] The term “autologous” is used to describe a material derived from a subject which is subsequently re-introduced into the same subject.

[0101] The term “allogeneic” is used to describe a graft derived from a different subject of the same species. As an example, a donor subject may be a related or unrelated to the recipient subject, but the donor subject has immune system markers which are similar to the recipient subject.

[0102] The term “xenogeneic” is used to describe a graft derived from a subject of a different species. As an example, the donor subject is from a different species than a recipient subject, and the donor subject and the recipient subject can be genetically and immunologically incompatible.

[0103] The term “cancer” is used to refer to a disease characterized by the rapid and uncontrolled growth of aberrant cells. Cancer cells can spread locally or through the bloodstream and lymphatic system to other parts of the body. Examples of various cancers include breast cancer, prostate cancer, ovarian cancer, cervical cancer, skin cancer, pancreatic cancer, colorectal cancer, renal cancer, liver cancer, brain cancer, lymphoma, leukemia, lung cancer, and the like.

[0104] Throughout this specification, unless the context requires otherwise, the words “comprise,” “includes” and “including” will be understood to imply the inclusion of a stated step or element or group of steps or elements but not the exclusion of any other step or element or group of steps or elements.

[0105] The phrase “consisting of” is meant to include, and is limited to, whatever follows the phrase “consisting of.” Thus, the phrase “consisting of” indicates that the listed elements are required or mandatory and that no other elements may be present.

[0106] The phrase “consisting essentially of” is meant to include any element listed after the phrase and can include other elements that do not interfere with or contribute to the activity or action specified in the disclosure for the listed elements. Thus, the phrase “consisting essentially of” indicates that the listed elements are required or mandatory, but that other elements are optional and may or may not be present depending upon whether or not they affect the activity or action of the listed elements.

[0107] The terms “complementary” and “complementarity” refer to polynucleotides (i.e., a sequence of nucleotides) related by the base-pairing rules. For example, the sequence “A-G-T,” is complementary to the sequence “T-C-A.” Complementarity may be “partial,” in which only some of the nucleic acids' bases are matched according to the base pairing rules, or there may be “complete” or “total” complementarity between the nucleic acids. The degree of complementarity between nucleic acid strands has significant effects on the efficiency and strength of hybridization between nucleic acid strands.

[0108] The term “corresponds to” or “corresponding to” refers to (a) a polynucleotide having a nucleotide sequence that is substantially identical or complementary to all or a portion of a reference polynucleotide sequence or encoding an amino acid sequence identical to an amino acid sequence in a peptide or protein; or (b) a peptide or polypeptide having an amino acid sequence that is substantially identical to a sequence of amino acids in a reference peptide or protein.

[0109] The term “co-stimulatory ligand,” refers to a molecule on an antigen presenting cell (e.g., an APC, dendritic cell, B cell, and the like) that specifically binds a cognate co-stimulatory molecule on a T cell, thereby providing a signal which, in addition to the primary signal provided by, for instance, binding of a TCR/CD3 complex with an MHC molecule loaded with peptide, mediates a T cell response, including at least one of proliferation, activation, differentiation, and other cellular responses. A co-stimulatory ligand can include B7-1 (CD80), B7-2 (CD86), PD-L1, PD-L2, 4-1BBL, OX40L, inducible co-stimulatory ligand (ICOS-L), intercellular adhesion molecule (ICAM), CD30L, CD40, CD70, CD83, HLA-G, MICA, MICB, HVEM, lymphotoxin beta receptor, 3/TR6, ILT3, ILT4, HVEM, a ligand for CD7, an agonist or antibody that binds the Toll ligand receptor, and a ligand that specifically binds with B7-H3. A co-stimulatory ligand also includes, inter alia, an agonist or an antibody that specifically binds with a co-stimulatory molecule present on a T cell, such as CD27, CD28, 4-1BB, OX40, CD30, CD40, PD-1, ICOS, lymphocyte function-associated antigen-1 (LFA-1), CD2, CD7, LIGHT, NKG2C, B7-H3, and a ligand that specifically binds CD83.

[0110] The term “co-stimulatory molecule” refers to the cognate binding partner on a T cell that specifically binds with a co-stimulatory ligand, thereby mediating a co-stimulatory response by the T cell, such as proliferation. Co-stimulatory molecules include an MHC class I molecule, BTLA, and a Toll-like receptor.

[0111] The term “co-stimulatory signal” refers to a signal, which in combination with a primary signal, such as TCR/CD3 ligation, leads to T cell proliferation and/or upregulation or downregulation of key molecules.

[0112] The terms “disease” and “condition” may be used interchangeably or may be different in that the particular malady or condition may not have a known causative agent (so that etiology has not yet been worked out), and it is therefore not yet recognized as a disease but only as an undesirable condition or syndrome, wherein a more or less specific set of symptoms have been identified by clinicians. The term “disease” is a state of health of a subject wherein the subject cannot maintain homeostasis, and wherein if the disease is not ameliorated then the subject's health continues to deteriorate. In contrast, a “disorder” in a subject is a state of health in which the animal is able to maintain homeostasis, but in which the animal's state of health is less favorable than it would be in the absence of the disorder. Left untreated, a disorder does not necessarily cause a further decrease in the animal's state of health.

[0113] The term “effective” refers to adequate to accomplish a desired, expected, or intended result. For example, an “effective amount” in the context of treatment may be an amount of a compound sufficient to produce a therapeutic or prophylactic benefit.

[0114] The term “encoding” refers to the inherent property of specific sequences of nucleotides in a polynucleotide, such as a gene, a cDNA, or an mRNA, to serve as a template for synthesis of other polymers and macromolecules in biological processes having either a defined sequence of nucleotides (i.e., rRNA, tRNA and mRNA) or a defined sequence of amino acids and the biological properties resulting therefrom. Thus, a gene encodes a protein if transcription and translation of mRNA corresponding to that gene produces the protein in a cell or other biological system. Both the coding strand, the nucleotide sequence of which is identical to the mRNA sequence (except that a “T” is replaced by a “U”) and is usually provided in sequence listings, and the non-coding strand, used as the template for transcription of a gene or cDNA, can be referred to as encoding the protein or other product of that gene or cDNA.

[0115] The term “exogenous” refers to a molecule that does not naturally occur in a wild-type cell or organism but is typically introduced into the cell by molecular biological techniques. Examples of exogenous polynucleotides include vectors, plasmids, and/or man-made nucleic acid constructs encoding the desired protein. With regard to polynucleotides and proteins, the term “endogenous” or “native” refers to naturally-occurring polynucleotide or amino acid sequences that may be found in a given wild-type cell or organism. Also, a particular polynucleotide sequence that is isolated from a first organism and transferred to a second organism by molecular biological techniques is typically considered an “exogenous” polynucleotide or amino acid sequence with respect to the second organism. In specific embodiments, polynucleotide sequences can be “introduced” by molecular biological techniques into a microorganism that already contains such a polynucleotide sequence, for instance, to create one or more additional copies of an otherwise naturally-occurring polynucleotide sequence, and thereby facilitate overexpression of the encoded polypeptide.

[0116] The term “expression or overexpression” refers to the transcription and/or translation of a particular nucleotide sequence into a precursor or mature protein, for example, driven by its promoter. “Overexpression” refers to the production of a gene product in transgenic organisms or cells that exceeds levels of production in normal or non-transformed organisms or cells. As defined herein, the term “expression” refers to expression or overexpression.

[0117] The term “expression vector” refers to a vector including a recombinant polynucleotide including expression control (regulatory) sequences operably linked to a nucleotide sequence to be expressed. An expression vector includes sufficient cis-acting elements for expression; other elements for expression can be supplied by the host cell or in an in vitro expression system. Expression vectors include all those known in the art, such as cosmids, plasmids (e.g., naked or contained in liposomes) and viruses (e.g., lentiviruses, retroviruses, adenoviruses, and adeno-associated viruses) that incorporate the recombinant polynucleotide.

[0118] Viruses can be used to deliver nucleic acids into a cell in vitro and in vivo (in a subject). Examples of viruses useful for delivery of nucleic acids into cells include retrovirus, adenovirus, herpes simplex virus, vaccinia virus, and adeno-associated virus.

[0119] There also exist non-viral methods for delivering nucleic acids into a cell, for example, electroporation, gene gun, sonoporation, magnetofection, and the use of oligonucleotides, lipoplexes, dendrimers, and inorganic nanoparticles.

[0120] The term “homologous” refers to sequence similarity or sequence identity between two polypeptides or between two polynucleotides when a position in both of the two compared sequences is occupied by the same base or amino acid monomer subunit, e.g., if a position in each of two DNA molecules is occupied by adenine, then the molecules are homologous at that position. The percent of homology between two sequences is a function of the number of matching or homologous positions shared by the two sequences divided by the number of positions compared ×100. For example, if 6 of 10 of the positions in two sequences are matched or homologous, then the two sequences are 60% homologous. By way of example, the DNA sequences ATTGCC and TATGGC share 50% homology. A comparison is made when two sequences are aligned to give maximum homology.

[0121] The term “immunoglobulin” or “Ig,” refers to a class of proteins, which function as antibodies. The five members included in this class of proteins are IgA, IgG, IgM, IgD, and IgE. IgA is the primary antibody that is present in body secretions, such as saliva, tears, breast milk, gastrointestinal secretions and mucus secretions of the respiratory and genitourinary tracts. IgG is the most common circulating antibody. IgM is the main immunoglobulin produced in the primary immune response in most subjects. It is the most efficient immunoglobulin in agglutination, complement fixation, and other antibody responses, and is important in defense against bacteria and viruses. IgD is the immunoglobulin that has no known antibody function but may serve as an antigen receptor. IgE is the immunoglobulin that mediates immediate hypersensitivity by causing the release of mediators from mast cells and basophils upon exposure to the allergen.

[0122] The term “isolated” refers to a material that is substantially or essentially free from components that normally accompany it in its native state. The material can be a cell or a macromolecule such as a protein or nucleic acid. For example, an “isolated polynucleotide,” as used herein, refers to a polynucleotide, which has been purified from the sequences which flank it in a naturally-occurring state, e.g., a DNA fragment which has been removed from the sequences that are normally adjacent to the fragment. Alternatively, an “isolated peptide” or an “isolated polypeptide” and the like, as used herein, refer to in vitro isolation and/or purification of a peptide or polypeptide molecule from its natural cellular environment, and from association with other components of the cell.

[0123] The term “substantially purified” refers to a material that is substantially free from components that are normally associated with it in its native state. For example, a substantially purified cell refers to a cell that has been separated from other cell types with which it is normally associated in its naturally occurring or native state. In some instances, a population of substantially purified cells refers to a homogenous population of cells. In other instances, this term refers simply to a cell that has been separated from the cells with which they are naturally associated in their natural state. In embodiments, the cells are cultured in vitro. In embodiments, the cells are not cultured in vitro.

[0124] In the context of the present disclosure, the following abbreviations for the commonly occurring nucleic acid bases are used. “A” refers to adenosine, “C” refers to cytosine, “G” refers to guanosine, “T” refers to thymidine, and “U” refers to uridine.

[0125] Unless otherwise specified, a “nucleotide sequence encoding an amino acid sequence” includes all nucleotide sequences that are degenerate versions of each other and that encode the same amino acid sequence. The phrase nucleotide sequence that encodes a protein or an RNA may also include introns to the extent that the nucleotide sequence encoding the protein may in some version contain an intron(s).

[0126] The term “lentivirus” refers to a genus of the Retroviridae family. Lentiviruses are unique among the retroviruses in being able to infect non-dividing cells; they can deliver a significant amount of genetic information into the DNA of the host cell, so they are one of the most efficient methods of a gene delivery vector. Moreover, the use of lentiviruses enables integration of the genetic information into the host chromosome resulting in stably transduced genetic information. HIV, SIV, and FIV are all examples of lentiviruses. Vectors derived from lentiviruses offer the means to achieve significant levels of gene transfer in vivo.

[0127] The term “modulating,” refers to mediating a detectable increase or decrease in the level of a response in a subject compared with the level of a response in the subject in the absence of a treatment or compound, and/or compared with the level of a response in an otherwise identical but untreated subject. The term encompasses perturbing and/or affecting a native signal or response thereby mediating a beneficial therapeutic response in a subject, preferably, a human.

[0128] Nucleic acid is “operably linked” when it is placed into a functional relationship with another nucleic acid sequence. For example, DNA for a presequence or secretory leader is operably linked to DNA for a polypeptide if it is expressed as a preprotein that participates in the secretion of the polypeptide; a promoter or enhancer is operably linked to a coding sequence if it affects the transcription of the sequence; or a ribosome binding site is operably linked to a coding sequence if it is positioned so as to facilitate translation.

[0129] The term “under transcriptional control” refers to a promoter being operably linked to and in the correct location and orientation in relation to a polynucleotide to control (regulate) the initiation of transcription by RNA polymerase and expression of the polynucleotide.

[0130] The term “overexpressed” tumor antigen or “overexpression” of the tumor antigen is intended to indicate an abnormal level of expression of the tumor antigen in a cell from a disease area such as a solid tumor within a specific tissue or organ of the patient relative to the level of expression in a normal cell from that tissue or organ. Patients having solid tumor or a hematological malignancy characterized by overexpression of the tumor antigen can be determined by standard assays known in the art.

[0131] Solid tumors are abnormal masses of tissue that usually do not contain cysts or liquid areas. Solid tumors can be benign or malignant. Different types of solid tumors are named for the type of cells that form them (such as sarcomas, carcinomas, and lymphomas). Examples of solid tumors, such as sarcomas and carcinomas, include fibrosarcoma, myxosarcoma, liposarcoma, chondrosarcoma, osteosarcoma, synovioma, mesothelioma, Ewing's tumor, leiomyosarcoma, rhabdomyosarcoma, colon carcinoma, lymphoid malignancy, pancreatic cancer, breast cancer, lung cancers, ovarian cancer, prostate cancer, hepatocellular carcinoma, squamous cell carcinoma, basal cell carcinoma, adenocarcinoma, sweat gland carcinoma, medullary thyroid carcinoma, papillary thyroid carcinoma, pheochromocytomas sebaceous gland carcinoma, papillary carcinoma, papillary adenocarcinomas, medullary carcinoma, bronchogenic carcinoma, renal cell carcinoma, hepatoma, bile duct carcinoma, choriocarcinoma, Wilms' tumor, cervical cancer, testicular tumor, seminoma, bladder carcinoma, melanoma, and CNS tumors (such as a glioma (such as brainstem glioma and mixed gliomas), glioblastoma (also known as glioblastoma multiforme), astrocytoma, CNS lymphoma, germinoma, medulloblastoma, Schwannoma craniopharyogioma, ependymoma, pinealoma, hemangioblastoma, acoustic neuroma, oligodendroglioma, menangioma, neuroblastoma, retinoblastoma, and brain metastases).

[0132] A solid tumor antigen is an antigen expressed on a solid tumor. In embodiments, solid tumor antigens are also expressed at low levels on healthy tissue. Examples of solid tumor antigens and their related disease tumors are provided in Table 1.

TABLE 1

| Solid Tumor antigen | Disease tumor |
|---|---|
| PRLR | Breast Cancer |
| CLCA1 | colorectal Cancer |
| MUC12 | colorectal Cancer |
| GUCY2C | colorectal Cancer |
| GPR35 | colorectal Cancer |
| CR1L | Gastric Cancer |
| MUC 17 | Gastric Cancer |
| TMPRSS11B | esophageal Cancer |
| MUC21 | esophageal Cancer |
| TMPRSS11E | esophageal Cancer |
| CD207 | bladder Cancer |
| SLC30A8 | pancreatic Cancer |
| CFC1 | pancreatic Cancer |
| SLC12A3 | Cervical Cancer |
| SSTR1 | Cervical tumor |
| GPR27 | Ovary tumor |
| FZD10 | Ovary tumor |
| TSHR | Thyroid Tumor |
| SIGLEC15 | Urothelial cancer |
| SLC6A3 | Renal cancer |
| KISS1R | Renal cancer |
| QRFPR | Renal cancer: |
| GPR119 | Pancreatic cancer |
| CLDN6 | Endometrial cancer/Urothelial cancer |
| UPK2 | Urothelial cancer (including bladder cancer) |
| ADAM12 | Breast cancer, pancreatic cancer and the like |
| SLC45A3 | Prostate cancer |
| ACPP | Prostate cancer |
| MUC21 | Esophageal cancer |
| MUC16 | Ovarian cancer |
| MS4A12 | Colorectal cancer |
| ALPP | Endometrial cancer |
| CEA | Colorectal carcinoma |
| EphA2 | Glioma |
| FAP | Mesotelioma |
| GPC3 | Lung squamous cell carcinoma |
| IL13-Rα2 | Glioma |
| Mesothelin | Metastatic cancer |
| PSMA | Prostate cancer |
| ROR1 | Breast lung carcinoma |
| VEGFR-II | Metastatic cancer |
| GD2 | Neuroblastoma |
| FR-α | Ovarian carcinoma |
| ErbB2 | Carcinomasb |
| EpCAM | Carcinomasa |
| EGFRvIII | Glioma—Glioblastoma |
| EGFR | Glioma—NSCL cancer |
| tMUC1 | Cholangiocarcinoma, Pancreatic cancer, |
| | Breast |
| PSCA | pancreas, stomach, or prostate cancer |
| FCER2, GPR18, FCRLA, | breast cancer |
| CXCR5, FCRL3, FCRL2, | |
| HTR3A, and CLEC17A | |
| TRPMI, SLC45A2, and | lymphoma |
| SLC24A5 | |
| DPEP3 | melanoma |
| KCNK16 | ovarian, testis |
| LIM2 or KCNV2 | pancreatic |
| SLC26A4 | thyroid cancer |
| CD171 | Neuroblastoma |
| Glypican-3 | Sarcoma |
| IL-13 | Glioma |
| CD79a/b | Lymphoma |

[0133] The term “parenteral administration” of a composition includes, e.g., subcutaneous (s.c.), intravenous (i.v.), intramuscular (i.m.), intrasternal injection, or infusion techniques.

[0134] The terms “patient,” “subject,” and “individual,” and the like are used interchangeably herein and refer to any human, or animal, amenable to the methods described herein. In certain non-limiting embodiments, the patient, subject, or individual is a human or animal. In embodiments, the term “subject” is intended to include living organisms in which an immune response can be elicited (e.g., mammals). Examples of subjects include humans, and animals, such as dogs, cats, mice, rats, and transgenic species thereof.

[0135] A subject in need of treatment or in need thereof includes a subject having a disease, condition, or disorder that needs to be treated. A subject in need thereof also includes a subject that needs treatment for prevention of a disease, condition, or disorder.

[0136] The term “polynucleotide” or “nucleic acid” refers to mRNA, RNA, cRNA, rRNA, cDNA or DNA. The term typically refers to a polymeric form of nucleotides of at least 10 bases in length, either ribonucleotides or deoxynucleotides or a modified form of either type of nucleotide. The term includes all forms of nucleic acids including single and double-stranded forms of nucleic acids.

[0137] The terms “polynucleotide variant” and “variant” and the like refer to polynucleotides displaying substantial sequence identity with a reference polynucleotide sequence or polynucleotides that hybridize with a reference sequence under stringent conditions that are defined hereinafter. These terms also encompass polynucleotides that are distinguished from a reference polynucleotide by the addition, deletion or substitution of at least one nucleotide. Accordingly, the terms “polynucleotide variant” and “variant” include polynucleotides in which one or more nucleotides have been added or deleted or replaced with different nucleotides. In this regard, it is well understood in the art that certain alterations inclusive of mutations, additions, deletions, and substitutions can be made to a reference polynucleotide whereby the altered polynucleotide retains the biological function or activity of the reference polynucleotide or has increased activity in relation to the reference polynucleotide (i.e., optimized). Polynucleotide variants include, for example, polynucleotides having at least 50% (and at least 51% to at least 99% and all integer percentages in between, e.g., 90%, 95%, or 98%) sequence identity with a reference polynucleotide sequence described herein. The terms “polynucleotide variant” and “variant” also include naturally-occurring allelic variants and orthologs.

[0138] The terms “polypeptide,” “polypeptide fragment,” “peptide,” and “protein” are used interchangeably herein to refer to a polymer of amino acid residues and to variants and synthetic analogues of the same. Thus, these terms apply to amino acid polymers in which one or more amino acid residues are synthetic non-naturally occurring amino acids, such as a chemical analogue of a corresponding naturally occurring amino acid, as well as to naturally-occurring amino acid polymers. In certain aspects, polypeptides may include enzymatic polypeptides, or “enzymes,” which typically catalyze (i.e., increase the rate of) various chemical reactions.

[0139] The term “polypeptide variant” refers to polypeptides that are distinguished from a reference polypeptide sequence by the addition, deletion, or substitution of at least one amino acid residue. In certain embodiments, a polypeptide variant is distinguished from a reference polypeptide by one or more substitutions, which may be conservative or non-conservative. In certain embodiments, the polypeptide variant comprises conservative substitutions and, in this regard, it is well understood in the art that some amino acids may be changed to others with broadly similar properties without changing the nature of the activity of the polypeptide. Polypeptide variants also encompass polypeptides in which one or more amino acids have been added or deleted or replaced with different amino acid residues.

[0140] The term “promoter” refers to a DNA sequence recognized by the synthetic machinery of the cell or introduced synthetic machinery, required to initiate the specific transcription of a polynucleotide sequence. The term “expression control (regulatory) sequences” refers to DNA sequences necessary for the expression of an operably linked coding sequence in a particular host organism. The control sequences that are suitable for prokaryotes, for example, include a promoter, optionally an operator sequence, and a ribosome binding site. Eukaryotic cells are known to utilize promoters, polyadenylation signals, and enhancers.

[0141] The term “bind,” “binds,” or “interacts with” refers to a molecule recognizing and adhering to a second molecule in a sample or organism but does not substantially recognize or adhere to other structurally unrelated molecules in the sample. The term “specifically binds,” as used herein with respect to an antibody, refers to an antibody which recognizes a specific antigen, but does not substantially recognize or bind other molecules in a sample. For example, an antibody that specifically binds an antigen from one species may also bind that antigen from one or more species. But, such cross-species reactivity does not itself alter the classification of an antibody as specific. In another example, an antibody that specifically binds an antigen may also bind different allelic forms of the antigen. However, such cross reactivity does not itself alter the classification of an antibody as specific. In some instances, the terms “specific binding” or “specifically binding,” can be used in reference to the interaction of an antibody, a protein, or a peptide with a second chemical species, to mean that the interaction is dependent upon the presence of a particular structure (e.g., an antigenic determinant or epitope) on the chemical species; for example, an antibody recognizes and binds a specific protein structure rather than to any protein. If an antibody is specific for epitope “A,” the presence of a molecule containing epitope A (or free, unlabeled A), in a reaction containing labeled “A” and the antibody, will reduce the amount of labeled A bound to the antibody.

[0142] By “statistically significant,” it is meant that the result was unlikely to have occurred by chance. Statistical significance can be determined by any method known in the art. Commonly used measures of significance include the p-value, which is the frequency or probability with which the observed event would occur if the null hypothesis were true. If the obtained p-value is smaller than the significance level, then the null hypothesis is rejected. In simple cases, the significance level is defined at a p-value of 0.05 or less. A “decreased” or “reduced” or “lesser” amount is typically a “statistically significant” or a physiologically significant amount, and may include a decrease that is about 1.1, 1.2, 1.3, 1.4, 1.5, 1.6 1.7, 1.8, 1.9, 2, 2.5, 3, 3.5, 4, 4.5, 5, 6, 7, 8, 9, 10, 15, 20, 30, 40, or 50 or more times (e.g., 100, 500, 1000 times) (including all integers and decimal points in between and above 1, e.g., 1.5, 1.6, 1.7. 1.8, etc.) an amount or level described herein.

[0143] The term “stimulation,” refers to a primary response induced by binding of a stimulatory molecule (e.g., a TCR/CD3 complex) with its cognate ligand thereby mediating a signal transduction event, such as signal transduction via the TCR/CD3 complex. Stimulation can mediate altered expression of certain molecules, such as downregulation of TGF-β, and/or reorganization of cytoskeletal structures.

[0144] The term “stimulatory molecule” refers to a molecule on a T cell that specifically binds a cognate stimulatory ligand present on an antigen presenting cell. For example, a functional signaling domain derived from a stimulatory molecule is the zeta chain associated with the T cell receptor complex. The stimulatory molecule includes a domain responsible for signal transduction.

[0145] The term “stimulatory ligand” refers to a ligand that when present on an antigen presenting cell (e.g., an APC, a dendritic cell, a B-cell, and the like.) can specifically bind with a cognate binding partner (referred to herein as a “stimulatory molecule”) on a cell, for example a T cell, thereby mediating a primary response by the T cell, including activation, initiation of an immune response, proliferation, and similar processes. Stimulatory ligands are well-known in the art and encompass, inter alia, an MHC Class I molecule loaded with a peptide, an anti-CD3 antibody, a superagonist anti-CD28 antibody, and a superagonist anti-CD2 antibody.

[0146] The term “therapeutic” refers to a treatment and/or prophylaxis. A therapeutic effect is obtained by suppression, remission, or eradication of a disease state or alleviating the symptoms of a disease state.

[0147] The term “therapeutically effective amount” refers to the amount of the subject compound that will elicit the biological or medical response of a tissue, system, or subject that is being sought by the researcher, veterinarian, medical doctor or another clinician. The term “therapeutically effective amount” includes that amount of a compound that, when administered, is sufficient to prevent the development of, or alleviate to some extent, one or more of the signs or symptoms of the disorder or disease being treated. The therapeutically effective amount will vary depending on the compound, the disease and its severity and the age, weight, etc., of the subject to be treated.

[0148] The term “treat a disease” refers to the reduction of the frequency or severity of at least one sign or symptom of a disease or disorder experienced by a subject.

[0149] The term “transfected” or “transformed” or “transduced” refers to a process by which an exogenous nucleic acid is transferred or introduced into the host cell. A “transfected” or “transformed” or “transduced” cell is one which has been transfected, transformed, or transduced with exogenous nucleic acid. The cell includes the primary subject cell and its progeny.

[0150] The term “vector” refers to a polynucleotide that comprises an isolated nucleic acid and which can be used to deliver the isolated nucleic acid to the interior of a cell. Numerous vectors are known in the art including linear polynucleotides, polynucleotides associated with ionic or amphiphilic compounds, plasmids, and viruses. Thus, the term “vector” includes an autonomously replicating plasmid or a virus. The term also includes non-plasmid and non-viral compounds which facilitate the transfer of nucleic acid into cells, such as, for example, polylysine compounds, liposomes, and the like. Examples of viral vectors include adenoviral vectors, adeno-associated virus vectors, retroviral vectors, and others. For example, lentiviruses are complex retroviruses, which, in addition to the common retroviral genes gag, pol, and env, contain other genes with regulatory or structural function. Lentiviral vectors are well known in the art. Some examples of lentivirus include the Human Immunodeficiency Viruses: HIV-1, HIV-2, and the Simian Immunodeficiency Virus: SIV. Lentiviral vectors have been generated by multiply attenuating the HIV virulence genes, for example, the genes env, vif, vpr, vpu, and nef are deleted making the vector biologically safe.

[0151] Ranges: throughout this disclosure, various aspects of the disclosure can be presented in a range format. It should be understood that the description in range format is merely for convenience and brevity and should not be construed as an inflexible limitation on the scope of the disclosure. Accordingly, the description of a range should be considered to have specifically disclosed all the possible subranges as well as individual numerical values within that range. For example, description of a range such as from 1 to 6 should be considered to have specifically disclosed subranges such as from 1 to 3, from 1 to 4, from 1 to 5, from 2 to 4, from 2 to 6, from 3 to 6 etc., as well as individual numbers within that range, for example, 1, 2, 2.7, 3, 4, 5, 5.3, and 6. This applies regardless of the breadth of the range.

[0152] A “chimeric antigen receptor” (CAR) molecule is a recombinant polypeptide including at least an extracellular domain, a transmembrane domain and a cytoplasmic domain or intracellular domain. In embodiments, the domains of the CAR are on the same polypeptide chain, for example a chimeric fusion protein. In embodiments, the domains are on different polypeptide chains, for example the domains are not contiguous.

[0153] The extracellular domain of a CAR molecule includes an antigen binding domain. The antigen binding domain is for expanding and/or maintaining the modified cells, such as a CAR T cell or for killing a tumor cell, such as a solid tumor. In embodiments, the antigen binding domain for expanding and/or maintaining modified cells binds an antigen, for example, a cell surface molecule or marker, on the surface of a WBC. In embodiments, the WBC is at least one of GMP (granulocyte macrophage precursor), MDP (monocyte-macrophage/dendritic cell precursors), cMoP (common monocyte precursor), basophil, eosinophil, neutrophil, SatM (Segerate-nucleus-containing atypical monocyte), macrophage, monocyte, CDP (common dendritic cell precursor), cDC (conventional DC), pDC (plasmacytoid DC), CLP (common lymphocyte precursor), B cell, ILC (Innate Lymphocyte), NK cell, megakaryocyte, myeloblast, pro-myelocyte, myelocyte, meta-myelocyte, band cells, lymphoblast, prolymphocyte, monoblast, megakaryoblast, promegakaryocyte, megakaryocyte, platelets, or MSDC (Myeloid-derived suppressor cell). In embodiments, the WBC is a granulocyte, monocyte and or lymphocyte. In embodiments, the WBC is a lymphocyte, for example, a B cell. In embodiments, the WBC is a B cell. In embodiments, the cell surface molecule of a B cell includes CD19, CD22, CD20, BCMA, CD5, CD7, CD2, CD16, CD56, CD30, CD14, CD68, CD11b, CD18, CD169, CD1c, CD33, CD38, CD138, or CD13. In embodiments, the cell surface molecule of the B cell is CD19, CD20, CD22, or BCMA. In embodiments, the cell surface molecule of the B cell is CD19.

[0154] The cells described herein, including modified cells such as CAR cells and modified T cells can be derived from stem cells. Stem cells may be adult stem cells, embryonic stem cells, more particularly non-human stem cells, cord blood stem cells, progenitor cells, bone marrow stem cells, induced pluripotent stem cells, totipotent stem cells or hematopoietic stem cells. A modified cell may also be a dendritic cell, a NK-cell, a B-cell or a T cell selected from the group consisting of inflammatory T-lymphocytes, cytotoxic T-lymphocytes, regulatory T lymphocytes or helper T-lymphocytes. In embodiments, Modified cells may be derived from the group consisting of CD4+ T lymphocytes and CD8+ T lymphocytes. Prior to expansion and genetic modification of the cells of the invention, a source of cells may be obtained from a subject through a variety of non-limiting methods. T cells may be obtained from a number of non-limiting sources, including peripheral blood mononuclear cells, bone marrow, lymph node tissue, cord blood, thymus tissue, tissue from a site of infection, ascites, pleural effusion, spleen tissue, and tumors. In certain embodiments of the present invention, any number of T cell lines available and known to those skilled in the art, may be used. In embodiments, modified cells may be derived from a healthy donor, from a patient diagnosed with cancer or from a patient diagnosed with an infection. In embodiments, a modified cell is part of a mixed population of cells which present different phenotypic characteristics.

[0155] A population of cells refers to a group of two or more cells. The cells of the population could be the same, such that the population is a homogenous population of cells. The cells of the population could be different, such that the population is a mixed population or a heterogeneous population of cells. For example, a mixed population of cells could include modified cells comprising a first CAR and cells comprising a second CAR, wherein the first CAR and the second CAR bind different antigens.

[0156] The term “stem cell” refers to any of certain types of cell which have the capacity for self-renewal and the ability to differentiate into other kind(s) of cell. For example, a stem cell gives rise either to two daughter stem cells (as occurs in vitro with embryonic stem cells in culture) or to one stem cell and a cell that undergoes differentiation (as occurs e.g. in hematopoietic stem cells, which give rise to blood cells). Different categories of stem cells may be distinguished on the basis of their origin and/or on the extent of their capacity for differentiation into other types of cell. For example, stem cells may include embryonic stem (ES) cells (i.e., pluripotent stem cells), somatic stem cells, induced pluripotent stem cells, and any other types of stem cells.

[0157] The pluripotent embryonic stem cells are found in the inner cell mass of a blastocyst and have an innate capacity for differentiation. For example, pluripotent embryonic stem cells have the potential to form any type of cell in the body. When grown in vitro for long periods of time, ES cells maintain pluripotency as progeny cells retain the potential for multilineage differentiation.

[0158] Somatic stem cells can include fetal stem cells (from the fetus) and adult stem cells (found in various tissues, such as bone marrow). These cells have been regarded as having a capacity for differentiation that is lower than that of the pluripotent ES cells—with the capacity of fetal stem cells being greater than that of adult stem cells. Somatic stem cells apparently differentiate into only a limited number of types of cells and have been described as multipotent. The “tissue-specific” stem cells normally give rise to only one type of cell. For example, embryonic stem cells may be differentiated into blood stem cells (e.g., Hematopoietic stem cells (HSCs)), which may be further differentiated into various blood cells (e.g., red blood cells, platelets, white blood cells, etc.).

[0159] Induced pluripotent stem cells (i.e., iPS cells or iPSCs) may include a type of pluripotent stem cell artificially derived from a non-pluripotent cell (e.g., an adult somatic cell) by inducing an expression of specific genes. Induced pluripotent stem cells are similar to natural pluripotent stem cells, such as embryonic stem (ES) cells, in many aspects, such as the expression of certain stem cell genes and proteins, chromatin methylation patterns, doubling time, embryoid body formation, teratoma formation, viable chimera formation, and potency and differentiability. Induced pluripotent cells can be obtained from adult stomach, liver, skin, and blood cells.

[0160] In embodiments, the antigen binding domain for killing a tumor, binds an antigen on the surface of a tumor, for example a tumor antigen or tumor marker. Tumor antigens are proteins that are produced by tumor cells that elicit an immune response, particularly T cell mediated immune responses. Tumor antigens are well known in the art and include, for example, tumor associated MUC1 (tMUC1), a glioma-associated antigen, carcinoembryonic antigen (CEA), β-human chorionic gonadotropin, alphafetoprotein (AFP), lectin-reactive AFP, thyroglobulin, RAGE-1, MN-CA IX, human telomerase reverse transcriptase, RU1, RU2 (AS), intestinal carboxyl esterase, mut hsp70-2, M-CSF, prostase, prostate-specific antigen (PSA), PAP, NY-ESO-1, LAGE-1a, p53, prostein, PSMA, Her2/neu, surviving, telomerase, prostate-carcinoma tumor antigen-1 (PCTA-1), MAGE, ELF2M, neutrophil elastase, ephrinB2, CD22, insulin growth factor (IGF)-I, IGF-II, IGF-I receptor, CD19, and mesothelin. For example, when the tumor antigen is CD19, the CAR thereof can be referred to as CD19 CAR or 19CAR, which is a CAR molecule that includes an antigen binding domain that binds CD19.

[0161] In embodiments, the extracellular antigen binding domain of a CAR includes at least one scFv or at least a single domain antibody. As an example, there can be two scFvs on a CAR. The scFv includes a light chain variable (VL) region and a heavy chain variable (VH) region of a target antigen-specific monoclonal antibody joined by a flexible linker. Single chain variable region fragments can be made by linking light and/or heavy chain variable regions by using a short linking peptide (Bird et al., Science 242:423-426, 1988). An example of a linking peptide is the GS linker having the amino acid sequence (GGGGS)₃ (SEQ ID NO: 278), which bridges approximately 3.5 nm between the carboxy terminus of one variable region and the amino terminus of the other variable region. Linkers of other sequences have been designed and used (Bird et al., 1988, supra). In general, linkers can be short, flexible polypeptides and preferably comprised of about 20 or fewer amino acid residues. The single chain variants can be produced either recombinantly or synthetically. For synthetic production of scFv, an automated synthesizer can be used. For recombinant production of scFv, a suitable plasmid containing polynucleotide that encodes the scFv can be introduced into a suitable host cell, either eukaryotic, such as yeast, plant, insect or mammalian cells, or prokaryotic, such as E. coli. Polynucleotides encoding the scFv of interest can be made by routine manipulations such as ligation of polynucleotides. The resultant scFv can be isolated using standard protein purification techniques known in the art.

[0162] The cytoplasmic domain of the CAR molecules described herein includes one or more co-stimulatory domains and one or more signaling domains. The co-stimulatory and signaling domains function to transmit the signal and activate molecules, such as T cells, in response to antigen binding. The one or more co-stimulatory domains are derived from stimulatory molecules and/or co-stimulatory molecules, and the signaling domain is derived from a primary signaling domain, such as the CD3 zeta domain. In embodiments, the signaling domain further includes one or more functional signaling domains derived from a co-stimulatory molecule. In embodiments, the co-stimulatory molecules are cell surface molecules (other than antigens receptors or their ligands) that are required for activating a cellular response to an antigen.

[0163] In embodiments, the co-stimulatory domain includes the intracellular domain of CD27, CD28, 4-1BB, OX40, CD30, CD40, PD-1, ICOS, lymphocyte function-associated antigen-1 (LFA-1), CD2, CD7, LIGHT, NKG2C, B7-H3, a ligand that specifically binds with CD83, or any combination thereof. In embodiments, the signaling domain includes a CD3 zeta domain derived from a T cell receptor.

[0164] The CAR molecules described herein also include a transmembrane domain. The incorporation of a transmembrane domain in the CAR molecules stabilizes the molecule. In embodiments, the transmembrane domain of the CAR molecules is the transmembrane domain of a CD28 or 4-1BB molecule.

[0165] Between the extracellular domain and the transmembrane domain of the CAR, there may be incorporated a spacer domain. As used herein, the term “spacer domain” generally means any oligo- or polypeptide that functions to link the transmembrane domain to the extracellular domain and/or the cytoplasmic domain on the polypeptide chain. A spacer domain may include up to 300 amino acids, preferably 10 to 100 amino acids, and most preferably 25 to 50 amino acids.

[0166] The present disclosure describes a method for in vitro cell preparation, the method comprising: preparing cells; contacting the cells with (1) a first vector comprising a polynucleotide encoding a first antigen binding molecule that binds a first antigen and (2) a second vector comprising a polynucleotide encoding a second antigen binding molecule that binds a second antigen to obtain a population of modified cells, wherein the first antigen is different from the second antigen.

[0167] The present disclosure also describes a method for enhancing cell expansion in a subject having cancer, the method comprising: obtaining cells from the subject or a healthy donor; contacting the cells with (1) a first vector comprising a polynucleotide encoding a first antigen binding molecule that binds a first antigen and (2) a second vector comprising a polynucleotide encoding a second antigen binding molecule that binds a second antigen to obtain a population of modified cells; and administering an effective amount of modified cells to the subject, wherein: the first antigen is different from the second antigen; and the level of cell expansion in the subject is higher than the level of cell expansion in a subject administered with an effective amount of cells that have been contacted with the first vector but not the second vector.

[0168] The present disclosure also describes a method for treating a subject having cancer, the method comprising: obtaining cells from the subject or a healthy donor; contacting the cells with (1) a first vector comprising a polynucleotide encoding a first antigen binding molecule that binds a first antigen and (2) a second vector comprising a polynucleotide encoding a second antigen binding molecule that binds a second antigen to obtain a population of modified cells; and administering an effective amount of modified cells to the subject, wherein: the first antigen is different form the second antigen.

[0169] The present disclosure also describes a method for enhancing treatment of a subject having cancer, the method comprising: obtaining cells from the subject or a healthy donor; contacting the cells with (1) a first vector comprising a polynucleotide encoding a first antigen binding molecule that binds a first antigen and (2) a second vector comprising a polynucleotide encoding a second antigen binding molecule that binds a second antigen to obtain a population of modified cells; and administering an effective amount of modified cells to the subject, wherein: the first antigen is different from the second antigen; and the level of inhibition of tumor growth by the effective amount of modified cells is higher than the level of inhibition of tumor growth by the effective amount of cells that have been contacted with the second vector but not the first vector.

[0170] The present disclosure also describes a method for in vitro cell preparation, the method comprising: introducing a first vector comprising a polynucleotide encoding a first antigen binding molecule that binds a first antigen into a first population of cells; introducing a second vector comprising a polynucleotide encoding a second antigen binding molecule that binds a second antigen into a second population of cells; and culturing the first and second population of cells, wherein the first antigen is different from the second antigen.

[0171] The present disclosure also describes a method for enhancing cell expansion in a subject having cancer, the method comprising: introducing a first vector comprising a polynucleotide encoding a first antigen binding molecule that binds a first antigen into a first population of cells to obtain a first population of modified cells; introducing a second vector comprising a polynucleotide encoding a second antigen binding molecule that binds a second antigen into a second population of cells to obtain a second population of modified cells; and administering an effective amount of the first and second population of modified cells to the subject, wherein: the first antigen is different from the second antigen; and the level of cell expansion in the subject is higher than the level of cell expansion in a subject administered an effective amount of the second population of modified cells but not the first population of modified cells.

[0172] The present disclosure also describes a method for treating a subject having cancer, the method comprising: introducing a first vector comprising a polynucleotide encoding a first antigen binding molecule that binds a first antigen into a first population of cells to obtain a first population of modified cells; introducing a second vector comprising a polynucleotide encoding a second antigen binding molecule that binds a second antigen into a second population of cells to obtain a second population of modified cells; and administering an effective amount of the first and second population of modified cells to the subject, wherein: the first antigen is different from the second antigen.

[0173] The present disclosure also describes a method for enhancing treatment of a subject having cancer, the method comprising: introducing a first vector comprising a polynucleotide encoding a first antigen binding molecule that binds a first antigen into a first population of cells to obtain a first population of modified cells; introducing a second vector comprising a polynucleotide encoding a second antigen binding molecule that binds a second antigen into a second population of cells to obtain a second population of modified cells; and administering an effective amount of the first and second population of modified cells to the subject, wherein: the first antigen is different from the second antigen; and the level of inhibition of tumor growth in the subject by the effective amount of first population of modified cells is higher than the level of inhibition of tumor growth in the subject by the effective amount of the second population of modified cells that is not administered the first population of modified cells.

[0174] The present disclosure also describes a method for enhancing T cell response, the method comprising: introducing a first vector comprising a polynucleotide encoding a first antigen binding molecule that binds a first antigen into a first population of cells; introducing a second vector comprising a polynucleotide encoding a second antigen binding molecule that binds a second antigen into a second population of cells; contacting cells expressing the second antigen with the first population of cells and the second population of cells; and measuring a level of the T cell response, wherein the level is higher than a level of the T cell response in response to the cells contacted with the second population of cells without the first population.

[0175] The present disclosure also describes a method for enhancing T cell response, the method comprising: contacting a population of cells with a first vector comprising a polynucleotide encoding a first antigen binding molecule that binds a first antigen and a second vector comprising a polynucleotide encoding a second antigen binding molecule that binds a second antigen to obtain a population of modified cells; contacting cells expressing the second antigen with a population of modified cells; and measuring the level of the T cell response, wherein the level of T cell response is higher than the level of T cell response in cells contacted with the population of cells that have been contacted with the second vector but not the first vector.

[0176] The cells include macrophages, dendritic cells, or lymphocytes such as T cells or NK cells. In embodiments, the cells are T cells. In embodiments, the first antigen binding molecule binds a cell surface molecule of a WBC. In embodiments, the WBC is a granulocyte, a monocyte, or lymphocyte. In embodiments, the WBC is a B cell. In embodiments, the cell surface molecule of the WBC is CD19, CD22, CD20, BCMA, CD5, CD7, CD2, CD16, CD56, CD30, CD14, CD68, CD11b, CD18, CD169, CD1c, CD33, CD38, CD138, or CD13. In embodiments, the cell surface molecule of the WBC is CD19, CD20, CD22, or BCMA. In embodiments, the cell surface molecule of the WBC is CD19.

[0177] In embodiments, the second antigen binding molecule binds a solid tumor antigen. In embodiments, the solid tumor antigen is tumor associated MUC1 (tMUC1), PRLR, CLCA1, MUC12, GUCY2C, GPR35, CR1L, MUC 17, TMPRSS11B, MUC21, TMPRSS11E, CD207, SLC30A8, CFC1, SLC12A3, SSTR1, GPR27, FZD10, TSHR, SIGLEC15, SLC6A3, CLDN 18.2, KISS1R, QRFPR, GPR119, CLDN6, UPK2, ADAM12, SLC45A3, ACPP, MUC21, MUC16, MS4A12, ALPP, CEA, EphA2, FAP, GPC3, IL13-Rα2, Mesothelin, PSMA, ROR1, VEGFR-II, GD2, FR-α, ErbB2, EpCAM, EGFRvIII, or EGFR.

[0178] In embodiments, the first and second binding molecules are CARs. In embodiments, the CAR comprises an extracellular domain, a transmembrane domain, and an intracellular domain, and the extracellular domain binds a tumor antigen. In embodiments, the intracellular domain comprising a co-stimulatory domain comprises an intracellular domain of a co-stimulatory molecule selected from the group consisting of CD27, CD28, 4-1BB, OX40, CD30, CD40, PD-1, ICOS, lymphocyte function-associated antigen-1 (LFA-1), CD2, CD7, LIGHT, NKG2C, B7-H3, and any combination thereof. In embodiments, the intracellular domain comprises a CD3 zeta signaling domain.

[0179] In embodiments, the first binding molecule is a CAR, and the second binding molecule is TCR. In embodiments, the T cell comprises a modified T Cell Receptor (TCR). In embodiments, the TCR is derived from spontaneously occurring tumor-specific T cells in patients. In embodiments, the TCR binds a tumor antigen. In embodiments, the tumor antigen comprises CEA, gp100, MART-1, p53, MAGE-A3, or NY-ESO-1. In embodiments, the TCR comprises TCRγ and TCRδ chains, or TCRα and TCRβ chains, or a combination thereof.

[0180] In embodiments, the second population of cells are derived from tumor-infiltrating lymphocytes (TILs). In embodiments, a T cell clone that expresses a TCR with a high affinity for the target antigen may be isolated. TILs or peripheral blood mononuclear cells (PBMCs) can be cultured in the presence of antigen-presenting cells (APCs) pulsed with a peptide representing an epitope known to elicit a dominant T cell response when presented in the context of a defined HLA allele. High-affinity clones may be then selected on the basis of MHC-peptide tetramer staining and/or the ability to recognize and lyse target cells pulsed with low titrated concentrations of cognate peptide antigen. After the clone has been selected, the TCRα and TCRβ chains or TCRγ and TCRδ chains are identified and isolated by molecular cloning. For example, for TCRα and TCRβ chains, the TCRα and TCRβ gene sequences are then used to generate an expression construct that ideally promotes stable, high-level expression of both TCR chains in human T cells. The transduction vehicle, for example, a gammaretrovirus or lentivirus, can then be generated and tested for functionality (antigen specificity and functional avidity) and used to produce a clinical lot of the vector. An aliquot of the final product can then be used to transduce the target T cell population (generally purified from patient PBMCs), which is expanded before infusion into the patient.

[0181] Various methods may be implemented to obtain genes encoding tumor-reactive TCR. More information is provided in Kershaw et al., Clin Transl Immunology. 2014 May; 3(5): e16. In embodiments, specific TCR can be derived from spontaneously occurring tumor-specific T cells in patients. Antigens included in this category include the melanocyte differentiation antigens MART-1 and gp100, as well as the MAGE antigens and NY-ESO-1, with expression in a broader range of cancers. TCRs specific for viral-associated malignancies can also be isolated, as long as viral proteins are expressed by transformed cells. Malignancies in this category include liver and cervical cancer, those associated with hepatitis and papilloma viruses, and Epstein-Barr virus-associated malignancies. In embodiments, target antigens of the TCR include CEA (e.g., for colorectal cancer), gp100, MART-1, p53 (e.g., for melanoma), MAGE-A3 (e.g., melanoma, esophageal and synovial sarcoma), and NY-ESO-1 (e.g., for nelanoma and sarcoma as well as multiple myelomas).

[0182] In embodiments, preparation and transfusion of tumor infiltrating lymphocytes (TIL) may be implemented in the following manner. For example, tumor tissue coming from surgical or biopsy specimens, can be obtained under aseptic conditions and transported to the cell culture chamber in ice box. Necrotic tissue and adipose tissue can be removed. The tumor tissue can be cut into small pieces of about 1-3 cubic millimeter. Collagenase, hyaluronidase and DNA enzyme can be added, and digested overnight at 4° C. Filtering with 0.2 um filter, cells can be separated and collected by lymphocyte separation fluid, under 1500 rpm for 5 min. Expanding the cells in a culture medium comprising PHA, 2-mercaptoethanol, and CD3 monoclonal antibody, and a small dose of IL-2 (10-20 IU/ml) may be added to induce activation and proliferation. The cell density may be carefully measured and maintained within the range of 0.5-2×10⁶/ml for 7-14 days at a temperature of 37° C. with 5% CO₂. TIL positive cells having the ability to kill homologous cancer cell can be screened out by co-culture. The TIL positive cells can be amplified in a serum-free medium containing a high dose of IL-2 (5000-6000 IU/ml) until greater than 1×10¹¹ TILs can be obtained. To administer TILs, they are first collected in saline using continuous-flow centrifugation and then filtered through a platelet-administration set into a volume of 200-300 mL containing 5% albumin and 450000 IU of IL-2. The TILs can be infused into patients through a central venous catheter over a period of 30-60 minutes. In embodiments, TILs can be infused in two to four separate bags, and the individual infusions can be separated by several hours.

[0183] In embodiments, the population of modified cells comprise cells comprising the first binding molecule and cells comprising the second binding molecules. In embodiments, the population of modified cells comprise cells comprising the first binding molecule, cells comprising the second binding molecules, and cells comprising both the first binding molecule and the second binding molecule.

[0184] In embodiments, the increase in T cell response is based on the increase in the number of copies of CAR(s) and/or the amount of cytokine released (e.g., IL-6 and IFN-γ. In embodiments, the T cell response comprises cytokine releases, cell expansion, and/or activation levels. In embodiments, the first vector further comprises a polynucleotide encoding IL-6 or IFNγ, or a combination thereof. In embodiments, the first vector further comprises a polynucleotide encoding IL-12. In embodiments, the polynucleotide comprises a polynucleotide encoding NFAT and/or VHL. In embodiments, the population of modified cells comprises cells expressing the first binding molecule and IL-6 or IFNγ, or a combination thereof, cells expressing the second binding molecules, cells expressing the first and second molecules, and/or cells expressing the first binding molecule and IL-12. In embodiments, the population of modified cells comprises cells expressing the second binding molecule and IL-6 or IFNγ, or a combination thereof, cells expressing the second binding molecules, cells expressing the first and second molecules, and/or cells expressing the first binding molecule and IL-12. In embodiments, the population of modified cells comprises cells expressing the second binding molecule and IL-6 or IFNγ, or a combination thereof, cells expressing the second binding molecules, cells expressing the first and second molecules, and/or cells expressing the second binding molecule and IL-12. In embodiments, the population of modified cells comprises cells expressing a dominant negative form of PD-1.

[0185] The present disclosure describes nucleic acids encoding at least two different antigen binding domains. In embodiments, there is a first antigen binding domain that binds an antigen on the surface of a WBC, and there is a second antigen binding domain that binds an antigen on a tumor that is different from the antigen on the surface of a WBC. The first antigen binding domain functions to expand the cells that it is introduced into, while the second antigen binding domain functions to inhibit the growth of or kill tumor cells containing the target tumor antigen upon binding to the target antigen. In embodiments, a nucleic acid described herein encodes both the first and second antigen binding domains on the same nucleic acid molecule. In embodiments, the two antigen binding domains are encoded by two separate nucleic acid molecules. For example, a first nucleic acid encodes a first antigen binding domain and a second nucleic acid encodes a second antigen binding domain.

[0186] In embodiments, the present disclosure describes nucleic acids encoding a first antigen binding domain of a binding molecule and a second antigen binding domain of a binding molecule, wherein the first antigen binding domain binds a cell surface molecule of a WBC, and the second antigen binding domain binds an antigen different from the cell surface molecule of the WBC. In embodiments, the first antigen binding domain binds a cell surface antigen of a B cell or a B cell marker. In embodiments, the second binding domain does not bind a B cell marker. In embodiments, the second binding domain includes a scFv comprising an amino acid sequence of SEQ ID No: 264 or 265. For example, the second antigen binding domain is on a CAR having one of the amino acid sequences of SEQ ID NOs: 271-277.

[0187] In embodiments, the first and second antigen binding domains are on two different binding molecules (first and second binding molecules) such as a first CAR and a second CAR. As an example, a first CAR includes an extracellular binding domain that binds a marker on the surface of a B cell, and a second CAR includes an extracellular binding domain that binds a target antigen of a tumor cell. In embodiments, the first CAR and second CAR are encoded by different nucleic acids. In embodiments, the first CAR and second CAR are two different binding molecules but are encoded by a single nucleic acid.

[0188] In embodiments, the two different antigen binding domains can be on the same binding molecule, for example on a bispecific CAR, and encoded by a single nucleic acid. In embodiments, the bispecific CAR can have two different scFv molecules joined together by linkers. Examples of the bispecific CAR are provided in Table 2.

[0189] An example of a bispecific CAR is shown in FIG. 5. As shown in FIG. 5, a bispecific CAR (or tandem CAR (tanCAR)) may include two binding domains: scFv1 and scFv2. In embodiments, scFv1 binds an antigen of a white blood cell (e.g., CD19), and scFv2 binds a solid tumor antigen (e.g., tMUC1). In embodiments, scFv1 binds a solid tumor antigen, and scFv2 binds another solid tumor antigen (e.g., tMUC1 and CLDN 18.2). Claudin18.2 (CLDN 18.2) is a stomach-specific isoform of Claudin-18. CLDN 18.2 is highly expressed in gastric and pancreatic adenocarcinoma. In embodiments, scFv1 binds an antigen expressed on tumor cells but not on normal tissues (e.g., tMUC1); scFv2 binds an antigen expressed on nonessential tissues associated with solid tumor; and the killing of normal cells of the tissue does not cause a life-threatening event (e.g., complications) to the subject (e.g., TSHR, GUCY2C). Examples of the nonessential tissues include organs such as prostate, breast, or melanocyte. In embodiments, scFv1 and scFv2 bind to different antigens that expressed on the same nonessential tissue (e.g., ACPP and SLC45A3 for Prostate cancer, and SIGLEC15 and UPK2 for Urothelial cancer). The sequences of the bispecific CARs and their components may be found in Table 5.

TABLE 2

| Variable | | Variable | | Variable | | Variable |
|---|---|---|---|---|---|---|
| domain 1 | Linker 1 | domain 3 | Linker 2 | domain 5 | Linker3 | domain 7 |
| Anti-TSHR- | 3*GGGGS | Anti-TSHR- | 4*GGGGS | humanized- | 3*GGGGS | humanized- |
| VL | linker | VH | bispecific | anti CD19- | linker | anti CD19-VL |
| | | | CAR linker | VH | | |
| Anti-TSHR- | 3*GGGGS | Anti-TSHR- | 4*GGGGS | humanized- | 3*GGGGS | humanized- |
| VH | linker | VL | bispecific | anti CD19- | linker | anti CD19-VH |
| | | | CAR linker | VL | | |
| Tumor | 3*GGGGS | Tumor | 4*GGGGS | anti CD19- | 3*GGGGS | anti CD19-VH |
| associated | linker | associated | bispecific | VL | linker | |
| MUC1 | | MUC1 | CAR linker | | | |
| scFv-1 or 2 | | scFv-1 or 2 | | | | |
| VL | | VH | | | | |
| Tumor | 3*GGGGS | Tumor | 4*GGGGS | anti CD19- | 3*GGGGS | anti CD19-VL |
| associated | linker | associated | bispecific | VH | linker | |
| MUC1 | | MUC1 | CAR linker | | | |
| scFv-1 or 2 | | scFv-1 or 2 | | | | |
| VH | | VL | | | | |
| humanized- | 3*GGGGS | humanized- | 4*GGGGS | Tumor | 3*GGGGS | Tumor |
| anti CD19- | linker | anti CD19- | bispecific | associated | linker | associated |
| VH | | VL | CAR linker | MUC1 | | MUC1 scFv-1 |
| | | | | scFv-1 or 2 | | or 2 VH |
| | | | | VL | | |
| Tumor | 3*GGGGS | Tumor | 4*GGGGS | Anti-TSHR- | 3*GGGGS | Anti-TSHR-VH |
| associated | linker | associated | bispecific | VL | linker | |
| MUC1 | | MUC1 | CAR linker | | | |
| scFv-1 or 2 | | scFv-1 or 2 | | | | |
| VL | | VH | | | | |
| Anti-TSHR- | 3*GGGGS | Anti-TSHR- | 4*GGGGS | Tumor | 3*GGGGS | Tumor |
| VL | linker | VH | bispecific | associated | linker | associated |
| | | | CAR linker | MUC1 | | MUC1 scFv-1 |
| | | | | scFv-1 or 2 | | or 2 VH |
| | | | | VL | | |
| Tumor | 3*GGGGS | Tumor | 4*GGGGS | Anti- | 3*GGGGS | Anti-GUCY2C- |
| associated | linker | associated | bispecific | GUCY2C- | linker | VL or VH |
| MUC1 | | MUC1 | CAR linker | VH or VL | | |
| scFv-1 or 2 | | scFv-1 or 2 | | | | |
| VL | | VH | | | | |
| Anti- | 3*GGGGS | Anti- | 4*GGGGS | Tumor | 3*GGGGS | Tumor |
| GUCY2C- | linker | GUCY2C- | bispecific | associated | linker | associated |
| VH or VL | | VL or VH | CAR linker | MUC1 | | MUC1 scFv-1 |
| | | | | scFv-1 or 2 | | or 2 VH |
| | | | | VL | | |
| Tumor | 3*GGGGS | Tumor | 4*GGGGS | Anti-ACPP- | 3*GGGGS | Anti- ACPP- |
| associated | linker | associated | bispecific | VH or VL | linker | VL or VH |
| MUC1 | | MUC1 | CAR linker | | | |
| scFv-1 or 2 | | scFv-1 or 2 | | | | |
| VL | | VH | | | | |
| Anti-ACPP- | 3*GGGGS | Anti- ACPP- | 4*GGGGS | Tumor | 3*GGGGS | Tumor |
| VH or VL | linker | VL or VH | bispecific | associated | linker | associated |
| | | | CAR linker | MUC1 | | MUC1 scFv-1 |
| | | | | scFv-1 or 2 | | or 2 VH |
| | | | | VL | | |
| Tumor | 3*GGGGS | Tumor | 4*GGGGS | Anti- | 3*GGGGS | Anti- |
| associated | linker | associated | bispecific | CLDN18.2- | linker | CLDN18.2-VL |
| MUC1 | | MUC1 | CAR linker | VH or VL | | or VH |
| scFv-1 or 2 | | scFv-1 or 2 | | | | |
| VL | | VH | | | | |
| Anti- | 3*GGGGS | Anti- | 4*GGGGS | Tumor | 3*GGGGS | Tumor |
| CLDN18.2- | linker | CLDN18.2- | bispecific | associated | linker | associated |
| VH or VL | | VL or VH | CAR linker | MUC1 | | MUC1 scFv-1 |
| | | | | scFv-1 or 2 | | or 2 VH |
| | | | | VL | | |
| Tumor | 3*GGGGS | Tumor | 4*GGGGS | Anti-UPK2- | 3*GGGGS | Anti- UPK2- |
| associated | linker | associated | bispecific | VH or VL | linker | VL or VH |
| MUC1 | | MUC1 | CAR linker | | | |
| scFv-1 or 2 | | scFv-1 or 2 | | | | |
| VL | | VH | | | | |
| Anti-UPK2- | 3*GGGGS | Anti- UPK2- | 4*GGGGS | Tumor | 3*GGGGS | Tumor |
| VH or VL | linker | VL or VH | bispecific | associated | linker | associated |
| | | | CAR linker | MUC1 | | MUC scFv-1 |
| | | | | scFv-1 or 2 | | or 2 VH |
| | | | | VL | | |
| Tumor | 3*GGGGS | Tumor | 4*GGGGS | Anti- | 3*GGGGS | Anti- |
| associated | linker | associated | bispecific | SIGLEC15- | linker | SIGLEC15-VL |
| MUC1 | | MUC1 | CAR linker | VH or VL | | or VH |
| scFv-1 or 2 | | scFv-1 or 2 | | | | |
| VL | | VH | | | | |
| Anti- | 3*GGGGS | Anti- | 4*GGGGS | Tumor | 3*GGGGS | Tumor |
| SIGLEC15- | linker | SIGLEC15- | bispecific | associated | linker | associated |
| VH or VL | | VL or VH | CAR linker | MUC1 | | MUC1 scFv-1 |
| | | | | scFv-1 or 2 | | or 2 VH |
| | | | | VL | | |

3*(GGGGS) is (GGGGS)₃ and 4*(GGGGS) is (GGGGS)₄.

[0190] In embodiments, the two different antigen binding domains can be on a CAR and a T cell receptor (TCR) and are encoded by separate nucleic acids. The binding domain of a TCR can target a specific tumor antigen or tumor marker on the cell of a tumor. In embodiments the TCR binding domain is a TCR alpha binding domain or TCR beta binding domain that targets a specific tumor antigen. In embodiments, the TCR comprises the TCRγ and TCRδ chains or the TCRα and TCRβ chains.

[0191] The present disclosure also describes vectors including the nucleic acids described herein. In embodiments, a single vector contains the nucleic acid encoding the first CAR and second CAR or TCR (containing the second antigen binding domain). In embodiments, a first vector contains the first nucleic acid encoding a first CAR, and a second vector contains the nucleic acid encoding the second CAR or TCR. In embodiments, the vector includes the nucleic acid encoding a bispecific CAR including at least the two different antigen binding domains. In embodiments, the vectors including the nucleic acids described herein are lentiviral vectors.

[0192] Moreover, the present disclosure describes modified cells comprising the nucleic acids or vectors described herein. The cells have been introduced with the nucleic acids or vectors described herein and express at least one or more different antigen binding domains. In embodiments, the cells express one antigen binding domain. In embodiments, the cells include a first antigen binding domain and a second antigen binding domain, wherein the first antigen binding domain binds a cell surface molecule of a WBC, and the second antigen binding domain binds an antigen different from the cell surface molecule of a WBC. In embodiments, the second antigen binding domain binds a tumor antigen. In embodiments, the cells are modified T cells. In embodiments, the modified T cells are CAR T cells including one or more nucleic acids encoding a first antigen binding domain and/or a second antigen binding domain. In embodiments, the modified cells include T cells containing a TCR including the second antigen binding domain.

[0193] Further, the present disclosure describes compositions including a mixed population of the modified cells described herein. In embodiments, the modified cells include modified lymphocytes, modified dendritic cells, and modified macrophages. In embodiments, the modified lymphocytes are modified T cells or modified NK cell. In embodiments, the modified T cells are CAR T cells.

[0194] The present disclosure describes a mixed population of modified cells effective for expanding and/or maintaining the modified cells in a patient. In embodiments, examples of a mixed population of modified cells include the following: (1) a first modified cell expressing an antigen binding domain for expanding and/or maintaining the modified cells and a second modified cell expressing an antigen binding domain for killing a target cell, such as a tumor cell; (2) the modified cells of (1) and a further modified cell expressing at least two different antigen binding domains, a first antigen binding domain for expanding and/or maintaining the modified cells and a second antigen binding domain for killing a target cell (wherein the two different antigen binding domains are expressed on the same cell); (3) a modified cell expressing at least two different antigen binding domains, a first antigen binding domain for expanding and/or maintaining the modified cells and a second antigen binding domain for killing a target cell (wherein the two different antigen binding domains are expressed on the same cell); (4) a modified cell expressing an antigen binding domain for killing a target cell and a modified cell expressing at least two antigen binding domains, a first antigen binding domain for expanding and/or maintaining the modified cells and a second antigen binding domain for killing a target cell (wherein the two different antigen binding domains are expressed on the same modified cell); or (5) a modified cell expressing an antigen binding domain for expanding and/or maintaining the modified cells and a modified cell expressing at least two antigen binding domains, a first antigen binding domain for expanding and/or maintaining the modified cells and a second antigen binding domain for killing a target cell (wherein the two different antigen binding domains are expressed on the same modified cell). In embodiments, the two antigen binding domains are different molecules. In embodiments, the antigen binding domain for expanding the modified cells (the first antigen binding domain) is an antigen binding domain that binds a WBC, such as a B cell, and the antigen binding domain for killing a target cell, such as tumor cell, (the second antigen binding domain) is an antigen binding domain that binds a tumor. In embodiments, the antigen binding domain binding a B cell binds the surface antigen of the B cell, for example, CD19, and the antigen binding domain binding a tumor binds an antigen of a tumor, for example tMUC1. In embodiments, the tumor cell is a solid tumor cell.

[0195] In embodiments, the mixed population of modified cells may include at least one of the following modified cells: a first modified cell expressing an antigen binding domain for expanding and/or maintaining the modified cells, a second modified cell expressing an antigen binding domain for killing a target cell, such as a tumor cell, and a third modified cell expressing both the antigen binding domain for expanding and/or maintaining the modified cells and the antigen binding domain for killing a target cell. For example, the mixed population of modified cells includes the first and second modified cells, the first and third modified cells, or the second and third modified cells. In embodiments, the first modified cell expresses a CAR binding an antigen of WBC (e.g., CD19); the second modified cell expresses a CAR or TCR binding a solid tumor antigen; and the third modified cell expresses the CAR binding the antigen of WBC and the CAR/TCR binding the solid tumor antigen. It has been reported that persistent antigen exposure can cause T cell exhaustion. Thus, a population of modified cells including the third modified cell can exhaust at a higher rate than the mixed population of modified cells. For example, the population of modified cells including the third modified cell alone can exhaust at a higher rate than the mixed population of modified cells including the first and the second modified cells in the presence of the antigen of WBC. Examples of the solid tumor antigens of TCR comprise TPO, TGM3, TDGF1, TROP2, LY6K, TNFSF13B, HEG1, LY75, HLA-G, CEACAM8, CEACAM6, EPHA2, GPRC5D, PLXDC2, HAVCR1, CLEC12A, CD79B, OR51E2, CDH17, IFITM1, MELTF, DR5, SLCBA3, ITGAM, SLC44A1, RHOC, CD109, ABCG2, ABCA10, ABCG8, 5t4, HHLA2, PRAME, CDH6, ESR1, SLC2A1, GJA5, ALPP, FGD2, PMEL, CYP19A1, MLANA, STEAP1, SSX2, PLAC1, ANKRD30A, CPA2, TTN, ZDHHC23, ARPP21, RBPMS, PAX5, MIA, CIZ1, AMACR, BAP31, IDO1, PGR, RAD51, USP17L2, OLAH, IGF2BP3, STS, IGF2, ACTA1, or CTAG1.

[0196] The mixed population of modified cells described herein includes about 1% to 10% modified cells expressing the first antigen binding domain, 50% to 60% modified cells expressing a second antigen binding domain, and about 10% modified cells expressing both the first antigen binding domain and the second antigen binding domain (wherein the first and second antigen binding domains are expressed in a single cell).

[0197] The present disclosure also describes methods of culturing cells described herein. The methods described herein include obtaining a cell comprising a first antigen binding domain and/or a second antigen binding domain, wherein the first antigen binding domain binds a cell surface molecule of a WBC, and the second antigen binding domain binds an antigen different from the cell surface molecule of the WBC; and culturing the cell in the presence of an agent derived from a cell surface molecule of the WBC or from an antigen to which the second antigen binding domain binds. In embodiments, the agent is an extracellular domain of a cell surface molecule of a WBC.

[0198] The present disclosure also describes methods of culturing mixed population of cells described herein. The methods described herein include obtaining a mixed population of cells comprising a first antigen binding domain and/or a second antigen binding domain, wherein the first antigen binding domain binds a cell surface molecule of a WBC, and the second antigen binding domain binds an antigen different from the cell surface molecule of the WBC; and culturing the cells in the presence of an agent derived from a cell surface molecule of the WBC or from an antigen to which the second antigen binding domain binds. In embodiments, the agent is an extracellular domain of a cell surface molecule of a WBC.

[0199] The present disclose describes methods for in vitro cell preparation, wherein the method includes providing cells; introducing one or more nucleic acids described herein encoding a first antigen binding domain and/or a second antigen binding domain into the cells, wherein the first antigen binding domain binds a cell surface molecule of a WBC, and the second antigen binding domain binds an antigen different from the cell surface molecule of the WBC; and culturing the cells in the presence of an agent derived from the cell surface molecule of the WBC or from an antigen to which the second antigen binding domain binds. The methods provide genetically modified cells including a first antigen binding domain, cells including a second binding domain, and cells including both the first and second antigen binding domain. The methods provide cells with single binding domains and cells expressing both antigen binding domains. The methods also provide a mixed population of cells including cells including a single binding domain and cells expressing both antigen binding domains. Additionally, the methods provide compositions including a mixed population of cells described herein.

[0200] The present disclosure describes using the prepared cell preparation, the mixed population of cells, or the compositions of mixed population of cells to enhance and maintain the T cell expansion in a subject having cancer, in order to be effective in killing the tumorigenic cells in the subject. In embodiments, the method comprises introducing a plurality of nucleic acids described herein into T cells to obtain a mixed population of modified T cells, the plurality of nucleic acids encoding a chimeric antigen receptor (CAR) or TCR binding a solid tumor antigen and/or encoding a CAR binding an antigen of a WBC; and administering an effective amount of a mixed population of modified cells to the subject, wherein examples of a mixed population of modified cells include the following: (1) T cells containing a CAR or TCR binding a solid tumor antigen and T cells containing a CAR binding an antigen of a WBC; (2) the T cells of (1) and further T cells containing both (i) a CAR or TCR binding a solid tumor antigen, and (ii) a CAR binding an antigen of a WBC (both (i) and (ii) are in a single modified T cell); (3) T cells containing both (i) the CAR or TCR binding a solid tumor antigen, and (ii) a CAR binding an antigen of a WBC (both (i) and (ii) are in a single modified T cell); (4) T cells containing a CAR or TCR binding a solid tumor antigen and T cells containing both (i) a CAR or TCR binding a solid tumor antigen and (ii) a CAR binding an antigen of a WBC (both (i) and (ii) are in a single modified T cell); or (5) T cells containing a CAR binding an antigen of a WBC and T cells containing both (i) a CAR or TCR binding a solid tumor antigen and (ii) a CAR binding an antigen of a WBC (both (i) and (ii) are in a single modified T cell). In embodiments, the WBC is a B cell. Additionally, the present disclosure describes methods for introducing and/or enhancing lymphocyte (T cell) response in a subject wherein the response is to a therapeutic agent (e.g., cytokines) or a therapy for treating the subject. Embodiments described herein involve a mechanism that expands and/or maintains the lymphocytes and a mechanism that relates to binding of a CAR to a tumor cell. In embodiments, the first mechanism involves a molecule involved in expanding and/or maintaining the lymphocytes in a subject, and an additional mechanism involves a molecule directed to inhibiting the growth of, or the killing of a tumor cell in the subject. In embodiments, the mechanisms involve signal transduction and molecules or domains of a molecules responsible for signal transduction are involved in the mechanisms described herein. For example, the first mechanism includes a CAR binding an antigen associated with blood, such as blood cells and blood plasma, or non-essential tissues, and the additional mechanism includes a CAR or TCR targeting an antigen associated with the tumor cell. Examples of non-essential tissues include the mammary gland, colon, gastric gland, ovary, blood components (such as WBC), and thyroid. In embodiments, the first mechanism involves a first antigen binding domain of a molecule, and the additional mechanism involves a second antigen binding domain of a molecule. In embodiments, the first mechanism and the additional mechanism are performed by a mixed population of modified cells. In embodiments, the mechanism involves a cell expressing an antigen associated with a tumor cell, and the additional mechanism involves a lymphocyte, such as a B cell, expressing a cell surface antigen. In embodiments, the CAR binding a solid tumor antigen is a bispecific CAR. In embodiments, the CAR binding an antigen of WBC is a bispecific CAR.

[0201] The methods described herein involves lymphocytes expressing an expansion molecule and a function molecule. In embodiments, the expansion molecule expands and/or maintains the lymphocytes in a subject, and the function molecule inhibits the growth of or kills a tumor cell in the subject. In embodiments, the expansion molecule and the function molecule are on a single CAR molecule, for example a bispecific CAR molecule. In embodiments, the expansion molecule and the function molecule are on separate molecules, for example, CAR and TCR or two different CARs. The expansion molecule can include a CAR binding to an antigen associated with blood (e.g., blood cells and blood plasma) or non-essential tissues, and the function molecule can include a CAR or TCR targeting an antigen associated with a tumor cell.

[0202] Lymphocyte or T cell response in a subject refers to cell-mediated immunity associated with a helper, killer, regulatory, and other types of T cells. For example, T cell response may include activities such as assisting other WBCs in immunologic processes and identifying and destroying virus-infected cells and tumor cells. T cell response in the subject can be measured via various indicators such as a number of virus-infected cells and/or tumor cells that T cells kill, the amount of cytokines (e.g., IL-6 and IFN-γ) that T cells release in vivo and/or in co-culturing with virus-infected cells and/or tumor cells, indicates a level of proliferation of T cells in the subject, a phenotype change of T cells, for example, changes to memory T cells, and a level longevity or lifetime of T cells in the subject.

[0203] In embodiments, the method of enhancing T cell response described herein can effectively treat a subject in need thereof, for example, a subject diagnosed with a tumor. The term tumor refers to a mass, which can be a collection of fluid, such as blood, or a solid mass. A tumor can be malignant (cancerous) or benign. Examples of blood cancers include chronic lymphocytic leukemia, acute myeloid leukemia, acute lymphoblastic leukemia, and multiple myeloma.

[0204] Solid tumors usually do not contain cysts or liquid areas. The major types of malignant solid tumors include sarcomas and carcinomas. Sarcomas are tumors that develop in soft tissue cells called mesenchymal cells, which can be found in blood vessels, bone, fat tissues, ligament lymph vessels, nerves, cartilage, muscle, ligaments, or tendon, while carcinomas are tumors that form in epithelial cells, which are found in the skin and mucous membranes. The most common types of sarcomas include undifferentiated pleomorphic sarcoma which involves soft tissue and bone cells; leiomyosarcoma which involves smooth muscle cells that line blood vessels, gastrointestinal tract, and uterus; osteosarcoma which involves bone cells, and liposarcoma which involves fat cells. Some examples of sarcomas include Ewing sarcoma, Rhabdomyosarcoma, chondosarcoma, mesothelioma, fibrosarcoma, fibrosarcoma, and glioma.

[0205] The five most common carcinomas include adrenocarcinoma which involves organs that produce fluids or mucous, such as the breasts and prostate; basal cell carcinoma which involves cells of the outer-most layer of the skin, for example, skin cancer; squamous cell carcinoma which involves the basal cells of the skin; and transitional cell carcinoma which affects transitional cells in the urinary tract which includes the bladder, kidneys, and ureter. Examples of carcinomas include cancers of the thyroid, breast, prostate, lung, intestine, skin, pancreas, liver, kidneys, and bladder, and cholangiocarcinoma.

[0206] The methods described herein can be used to treat a subject diagnosed with cancer. The cancer can be a blood cancer or can be a solid tumor, such as a sarcoma or carcinoma. The method of treating includes administering an effective amount of a mixed population of T cells described herein comprising a first antigen binding domain and/or a second antigen binding domain to the subject to provide a T-cell response, wherein the first antigen binding domain binds a cell surface molecule of a WBC, and the second antigen binding domain binds an antigen different from the cell surface molecule of the WBC. In embodiments, enhancing the T cell response in the subject includes selectively enhancing proliferation of T cell expressing the first antigen binding domain and the second antigen binding domain in vivo.

[0207] The methods for enhancing T cell response in a subject include administering to the subject T cells comprising a CAR or a bispecific CAR including two different antigen binding domains and T cells comprising a first CAR and a second CAR, wherein the first CAR and the second CAR, each includes a different antigen binding domain.

[0208] In embodiments, methods for enhancing T cell response in a subject described herein include administering to the subject T cells including a CAR molecule and a TCR molecule. The CAR molecule targets or binds a surface marker of a white blood cell, and the TCR molecule binds a marker or an antigen of the tumor that is expressed on the surface or inside the tumor cell.

[0209] In embodiments, the methods for enhancing T cell response in a subject in need thereof include administering to the subject, a mixed population of modified cells or a composition comprising a mixed population of modified cells. Examples of a mixed population of modified T cells include the following: (1) T cells containing a CAR binding an antigen of a WBC and T cells containing a CAR or TCR binding a tumor antigen; (2) the T cells of (1) and further T cells containing both (i) the CAR or TCR binding a tumor antigen, and (ii) a CAR binding an antigen of a WBC (both (i) and (ii) are in a single modified T cell); (3) T cells containing both (i) a CAR or TCR binding a tumor antigen, and (ii) a CAR binding an antigen of a WBC (both (i) and (ii) are in a single modified T cell); (4) T cells containing a CAR or TCR binding a tumor antigen and T cells containing both (i) a CAR or TCR binding a solid tumor antigen and (ii) a CAR binding an antigen of a WBC; or (5) T cells containing a CAR binding an antigen of a WBC and T cells containing both (i) a CAR or TCR binding a solid tumor antigen and (ii) the CAR binding the antigen of a WBC (both (i) and (ii) are in a single modified T cell). In embodiments, the subject is diagnosed with a solid tumor. In embodiments, the tumor antigen is a solid tumor antigen, for example tMUC1. In embodiments, the WBC is a B cell, and the antigen is a B cell antigen. In embodiments, the B cell antigen is CD19. In embodiments, the tumor antigen is tMUC1 and the antigen of a WBC is CD19.

[0210] The present disclosure describes methods of expanding and/or maintaining cells expressing an antigen binding domain in vivo. The method includes administering an effective amount of a mixed population of modified cells or a composition including a mixed population of modified cells described herein to a subject These methods described herein are useful for expanding T cells, NK cells, macrophages and/or dendritic cells.

[0211] The mixed population of modified T cells described herein include a first CAR and/or a second CAR or TCR. In embodiments, the first CAR contains a first antigen binding domain and the second CAR or TCR contains a second antigen binding domain. For example, the first CAR and the second CAR or TCR include an extracellular antigen binding domain, a transmembrane domain, and a cytoplasmic domain. The cytoplasmic domain of the first CAR and second CAR include a co-stimulatory domain and a CD3 zeta domain for transmitting signals for activation of cellular responses. In embodiments, the first CAR and second CAR or TCR are expressed on different modified T cells. In embodiments, the first CAR and second CAR or TCR are expressed on the same modified T cell.

[0212] In embodiments, in the mixed population of modified T cells described herein, the cytoplasmic domain of the first CAR, which contains an antigen binding domain for expanding and/or maintaining modified T cells, includes one or more co-stimulatory domains in the absence of a CD3 zeta domain such that activation or stimulation of the first CAR expands WBCs, such as lymphocytes, without introducing and/or activating the killing function of the modified T cells targeting the WBCs. In embodiments, the lymphocytes are T cells. In embodiments, when the cytoplasmic domain of the first CAR includes one or more co-stimulatory domains in the absence of a CD3 zeta domain, the second CAR includes a CD3 zeta domain.

[0213] In embodiments, the first and second antigen binding domains are on the same CAR (the first CAR), for example, a bispecific CAR with an extracellular antigen binding domain, a transmembrane domain, and a cytoplasmic domain. The extracellular antigen binding domain includes at least two scFvs and at least one of the scFvs function as a first antigen binding domain for binding a cell surface molecule of a WBC. In embodiments, the bispecific CAR is expressed on a modified T cell.

[0214] In embodiments, the antigen different from the cell surface molecule of the WBC is CD19, CD22, CD20, BCMA, CD5, CD7, CD2, CD16, CD56, CD30, CD14, CD68, CD11b, CD18, CD169, CD1c, CD33, CD38, CD138, CD13, B7-H3, CAIX, CD123, CD133, CD171, CD171/L1-CAM, CEA, Claudin 18.2, cMet, CS1, CSPG4, Dectin1, EGFR, EGFR vIII, EphA2, ERBB receptors, ErbB T4, ERBB2, FAP, Folate receptor 1, FITC, Folate receptor 1, FSH, GD2, GPC3, HA-1 H/HLA-A2, HER2, IL-11Ra, IL13 receptor a2, IL13R, IL13Rα2 (zetakine), Kappa, Leukemia, LewisY, Mesothelin, MUC1, NKG2D, NY-ESO-1, PSMA, ROR-1, TRAIL-receptor1, or VEGFR2.

[0215] In embodiments, the MUC1 is a tumor-exclusive epitope of a human MUC1, and the first CAR and the second CAR or the TCR are expressed as separate polypeptides. In embodiments, the MUC1 is a tumor form of human MUC1 (tMUC1).

[0216] In embodiments, in the mixed population of modified cells described herein, the first CAR, which includes an antigen binding domain for expanding and/or maintaining modified cells, may include a co-stimulatory domain without a signaling domain of CD3 zeta domain, and the CAR (second CAR) may comprise the MUC1 binding domain, a transmembrane domain, a co-stimulatory, and a CD3 zeta domain.

[0217] As used herein, the term “MUC1” refers to a molecule defined as follows. MUC1 is one of the epithelial mucin family of molecules. MUC1 is a transmembrane mucin glycoprotein that is normally expressed on all glandular epithelial cells of the major organs. In normal cells, MUC1 is only expressed on the apical surface and is heavily glycosylated with its core proteins sequestered by the carbohydrates. As cells transform to a malignant phenotype, expression of MUC1 increases several folds, and the expression is no longer restricted to the apical surface, but it is found all around the cell surface and in the cytoplasm. In addition, the glycosylation of tumor associated MUC1 (tMUC1) is aberrant, with greater exposure of the peptide core than is found on MUC1 expressed in normal tissues.

[0218] MUC1 is widely expressed on a large number of epithelial cancers and is aberrantly glycosylated making it structurally and antigenically distinct from that expressed by non-malignant cells (see, e.g., Barratt-Boyes, 1996; Price et al., 1998; Peterson et al., 1991). The dominant form of MUC1 is a high molecular weight molecule comprising a large highly immunogenic extracellular mucin-like domain with a large number of twenty amino acid tandem repeats, a transmembrane region, and a cytoplasmic tail (Quin et al., 2000; McGucken et al., 1995; Dong et al., 1997).

[0219] In most epithelial adenocarcinomas including breast and pancreas, MUC1 is overexpressed and aberrantly glycosylated. Adenocarcinoma of the breast and pancreas not only overexpress MUC1 but also shed MUC1 into the circulation. High MUC1 serum levels are associated with progressive disease. MUC1 has been exploited as a prospective biomarker because of the complex and heterogeneous nature of the epitopes expressed within the antigen. MUC1 synthesized by cancerous tissues (e.g., tumor associated MUC1) usually displays an aberrant oligosaccharide profile, which gives rise to the expression of neomarkers such as sialyl-Lea (assayed in the CA19-9 test), sialyl-Lex, and sialyl-Tn (TAG-72), as well as the cryptic epitopes such as Tn.

[0220] Several antibodies are being developed against MUC1 for therapeutic use. Pemtumomab (also known as HMFG1) is in Phase III clinical trials as a carrier to deliver the radioisotope Yttrium-90 into tumors in ovarian cancer (reviewed in Scott et al., 2012). CA15-3 (also the HMFG1 antibody), CA27-29, and CA19-9 are all antibodies to MUC1 that are used to assess levels of circulating MUC1 in patients with cancer. However, these antibodies have shown limited utility as therapeutic agents or as biomarkers because they cannot distinguish effectively between MUC1 expressed on normal versus transformed tumor epithelia. In other words, none of these antibodies appear to be targeted to a tumor associated MUC1 (tMUC1) epitope.

[0221] A new antibody that is highly specific for a tumor associated form of MUC1 (tMUC1) is designated TAB-004 and is described in U.S. Pat. No. 8,518,405 (see also Curry et al., 2013). While Pemtumomab (HMFG1) was developed using human milk fat globules as the antigen (Parham et al., 1988), TAB-004 was developed using tumors expressing an altered form of MUC1 (Tinder et al., 2008). TAB-004 recognizes the altered glycosylated epitope within the MUC1 tandem repeat sequence. This area is accessible for antigenic detection in tMUC but is blocked from antigenic detection in normal MUC1 by large branches of glycosylation (Gendler, 2001; Mukherjee et al., 2003b; Hollingsworth & Swanson, 2004; Kufe, 2009). Importantly, TAB-004 is different from the epitopes recognized by other MUC1 antibody and has unique complementary determinant regions (CDRs) of the heavy and light chains. The antibody binds the target antigen with a high binding affinity at 3 ng/ml (20 pM) and does not bind unrelated antigens (Curry et al., 2013). Thus, TAB-004 distinguishes between normal and tumor form of MUC1 while HMFG1 (Pemtumomab) does not (see U.S. Pat. No. 8,518,405).

[0222] In embodiments, the first CAR comprises the first antigen binding domain, a transmembrane domain, a co-stimulatory domain, and a CD3 zeta domain, and/or the second CAR comprises the second antigen binding domain, a transmembrane domain, a co-stimulatory domain, and a CD3 zeta domain.

[0223] In embodiments, the antigen binding domain is a Fab or a scFv. In embodiments, the first CAR comprises the amino acid sequence of one of SEQ ID NO: 5, 6, and 53-58; and the second CAR comprises the amino acid sequence of one of SEQ ID NOs: 5-17, 29, 33, 37, 71, and 72, or the amino acid sequence encoded by the nucleic acid sequence of one of SEQ ID NOs: 41, 45, 63, 67, and 68. In embodiments, a nucleic acid sequence encoding the first CAR comprises the nucleic acid sequence of SEQ ID NO: 59 or 60, and a nucleic acid sequence encoding the second CAR comprises the nucleic acid sequence of SEQ ID NO: 61. In embodiments, the nucleic acid comprises one of the nucleic acid sequence of SEQ ID NO: 62-69. In embodiments, the first CAR and the second CAR are expressed as separate polypeptides.

[0224] In embodiments, the first antigen binding domain is on a CAR and the second antigen binding domain is on a T Cell Receptor (TCR). In embodiments, the TCR is a modified TCR. In embodiments, the TCR is derived from spontaneously occurring tumor-specific T cells in patients. In embodiments, the TCR binds a tumor antigen. In embodiments, the tumor antigen comprises CEA, gp100, tMUC1, MART-1, p53, MAGE-A3, or NY-ESO-1.

[0225] As used herein, “a thyroid antigen” refers to an antigen expressed on or by a thyroid cell. Examples of thyroid cells include follicular cells and parafollicular cells. A human TSHR is a receptor for thyroid-stimulating hormone (TSH) which is present on the thyroid membrane (SEQ ID NO: 20). When TSH secreted from the pituitary gland binds to TSHR on the thyroid follicle cell membrane, the thyroid gland secretes T3 and T4 having metabolic functions. TSHR is a seven-transmembrane receptor having a molecular weight of about 95,000 to 100,000 Daltons. It was reported that the human thyrotropin receptor (TSHR) includes three domains: a leucine-rich domain (LRD; amino acids 36-281), a cleavage domain (CD; amino acids 282-409), and a transmembrane domain (TMD; amino acids 410-699). Human thyrotropin (hTSH) α chains were found to bind many amino acids on the LRD surface and CD surface. As used herein, “TSHR” refers to human thyroid stimulating hormone receptor. The term should be construed to include not only human thyroid stimulating hormone receptor, but variants, homologs, fragments and portions thereof to the extent that such variants, homologs, fragments and portions thereof retain the ability of human thyroid stimulating hormone receptor to bind to antibodies or ligands of human thyroid stimulating hormone receptor as disclosed herein.

[0226] In certain embodiments, the antigen is a stomach or colon antigen. For example, the colon antigen is Guanylate cyclase 2C (GUCY2C) having SEQ ID NO: 23. As used herein, “a colon antigen” refers to an antigen expressed on or by a colon cell. Examples of colon cells include goblet cells and enterocytes. Guanylyl cyclase 2C (GUCY2C) is principally expressed in intestinal epithelial cells. GUCY2C is the receptor for diarrheagenic bacterial enterotoxins (STs) and the gut paracrine hormones, guanylin, and uroguanylin. These ligands regulate water and electrolyte transport in the intestinal and renal epithelia and are ultimately responsible for acute secretory diarrhea. As used herein, “GUCY2C” refers to human Guanylyl cydase 2C. The term should be construed to include not only human Guanylyl cyclase 2C, but also variants, homologs, fragments and portions thereof to the extent that such variants, homologs, fragments and portions thereof retain the ability of Guanylyl cyclase 2C to bind antibodies or ligands of human Guanylyl cyclase 2C as disclosed herein. In embodiments, the amino acid sequence of at least a portion of GUCY2C comprises SEQ ID NO: 23. Claudin18.2 (CLDN 18.2) is a stomach-specific isoform of Claudin-18 and is highly expressed in gastric and pancreatic adenocarcinoma.

[0227] In embodiments, a T cell done that expresses a TCR with high affinity for the target antigen may be isolated. Tumor-infiltrating lymphocytes (TILs) or peripheral blood mononuclear cells (PBMCs) can be cultured in the presence of antigen-presenting cells (APCs) pulsed with a peptide representing an epitope known to elicit a dominant T cell response when presented in the context of a defined HLA allele. High-affinity clones may then be selected on the basis of MHC-peptide tetramer staining and/or the ability to recognize and lyse target cells pulsed with low titrated concentrations of cognate peptide antigen. After the clone has been selected, the TCRα and TCRβ chains or TCRγ and TCRδ chains are identified and isolated by molecular cloning. For example, for TCRα and TCRβ chains, the TCRα and TCRβ gene sequences are then used to generate an expression construct that ideally promotes stable, high-level expression of both TCR chains in human T cells. The transduction vehicle, for example, a gammaretrovirus or lentivirus, can then be generated and tested for functionality (antigen specificity and functional avidity) and used to produce a clinical lot of the vector. An aliquot of the final product can then be used to transduce the target T cell population (generally purified from patient PBMCs), which is expanded before infusion into the patient.

[0228] Various methods may be implemented to obtain genes encoding tumor-reactive TCR. More information is provided in Kershaw et al., Clin Transl Immunology. 2014 May; 3(5): e16. In embodiments, specific TCR can be derived from spontaneously occurring tumor-specific T cells in patients. Antigens included in this category include the melanocyte differentiation antigens MART-1 and gp100, as well as the MAGE antigens and NY-ESO-1, with expression in a broader range of cancers. TCRs specific for viral-associated malignancies can also be isolated, as long as viral proteins are expressed by transformed cells. Malignancies in this category include liver and cervical cancer, associated with hepatitis and papilloma viruses, and Epstein-Barr virus-associated malignancies. In embodiments, target antigens of the TCR may include CEA (e.g., for colorectal cancer), gp100, MART-1, p53 (e.g., for Melanoma), MAGE-A3 (e.g., Melanoma, esophageal and synovial sarcoma), NY-ESO-1 (e.g., for Melanoma and sarcoma as well as Multiple myelomas).

[0229] In embodiments, a binding domain of the first CAR binds CD19, and a binding domain of the second CAR binds tumor associated MUC1 (tMUC1). In embodiments, the binding domain of the second CAR comprises: (i) a heavy chain complementary determining region 1 comprising the amino acid sequence of SEQ ID: 76 or 85, a heavy chain complementary determining region 2 comprising the amino acid sequence of SEQ ID: 77 or 86, and a heavy chain complementary determining region 3 comprising the amino acid sequence of SEQ ID: 78 or 87; and (ii) a light chain complementary determining region 1 comprising the amino acid sequence of SEQ ID: 73 or 82, a light chain complementary determining region 2 comprising the amino acid sequence of TRP-ALA-SER (WAS) or SEQ ID: 83, and a light chain complementary determining region 3 comprising the amino acid sequence of SEQ ID: 75 or 84.

[0230] In embodiments, the binding domain of the second CAR comprises: (i) a heavy chain complementary determining region 1 comprising the amino acid sequence of SEQ ID: 76, a heavy chain complementary determining region 2 comprising the amino acid sequence of SEQ ID: 77, and a heavy chain complementary determining region 3 comprising the amino acid sequence of SEQ ID: 78; and (ii) a light chain complementary determining region 1 comprising the amino acid sequence of SEQ ID: 73, a light chain complementary determining region 2 comprising the amino acid sequence of TRP-ALA-SER (WAS), and a light chain complementary determining region 3 comprising the amino acid sequence of SEQ ID: 75.

[0231] In embodiments, the binding domain of the second CAR comprises: (i) a heavy chain complementary determining region 1 comprising the amino acid sequence of SEQ ID: 85, a heavy chain complementary determining region 2 comprising the amino acid sequence of SEQ ID: 86, and a heavy chain complementary determining region 3 comprising the amino acid sequence of SEQ ID: 87; and (ii) a light chain complementary determining region 1 comprising the amino acid sequence of SEQ ID: 82, a light chain complementary determining region 2 comprising the amino acid sequence of SEQ ID: 83, and a light chain complementary determining region 3 comprising the amino acid sequence of SEQ ID: 84. In embodiments, the binding domain of the first CAR comprises the amino acid sequence of SEQ ID: 5 or 6. In embodiments, the binding domain of the second CAR comprises one of the amino acid sequences of SEQ ID: 70-72 and 79-81.

[0232] In embodiments, the first CAR comprises the first antigen binding domain, a transmembrane domain, a co-stimulatory domain, and a CD3 zeta domain and/or the second CAR comprises the second antigen binding domain, a transmembrane domain, a co-stimulatory domain, and a CD3 zeta domain.

[0233] In embodiments, the first CAR and the second CAR are expressed as separate polypeptides.

[0234] In embodiments, the cytoplasmic domain or the transmembrane domain of the second CAR is modified such that the second CAR is capable of activating the modified T cell via cells expressing CD19 without damaging the cells expressing CD19.

[0235] Embodiments described herein relate to a bispecific chimeric antigen receptor, comprising: a first antigen binding domain, a second antigen binding domain, a cytoplasmic domain, and transmembrane domain, wherein the first antigen binding domain recognizes a first antigen, and the second antigen binding domain recognizes a second antigen, the first antigen is different from the second antigen.

[0236] In embodiments, the first antigen and the second antigen do not express on the same cell. In embodiments, the first antigen is an antigen of a blood component, and the second antigen is an antigen of a solid tumor.

[0237] Blood cells refer to red blood cells (RBCs), white blood cells (WBCs), platelets, or other blood cells. For example, RBCs are blood cells of delivering oxygen (O₂) to the body tissues via the blood flow through the circulatory system. Platelets are cells that are involved in hemostasis, leading to the formation of blood clots. WBCs are cells of the immune system involved in defending the body against both infectious disease and foreign materials. There are a number of different types and sub-types of WBCs and each has a different role to play. For example, granulocytes, monocytes, and lymphocytes are 3 major types of white blood cell. There are three different forms of granulocytes: Neutrophils, Eosinophils, Basophils.

[0238] A cell surface molecule of a WBC refers to a molecule expressed on the surface of the WBC. For example, the cell surface molecule of a lymphocyte may include CD19, CD22, CD20, BCMA, CD5, CD7, CD2, CD16, CD56, and CD30. The cell surface molecule of a B cell may include CD19, CD20, CD22, BCMA. The cell surface molecule of a monocyte may include CD14, CD68, CD11b, CD18, CD169, and CD1c. The cell surface molecule of granulocyte may include CD33, CD38, CD138, and CD13.

[0239] In embodiments, the first antigen is CD19, and the second antigen is a tumor associated MUC1 (tMUC1). In embodiments, the first antigen binding domain comprises one of the amino acid sequences of SEQ ID: 5 and 6. In embodiments, the second antigen binding domain comprises one of the amino acid sequences of SEQ ID: 70-72 and 79-81.

[0240] In embodiments, the present disclosure describes a method of enhancing T cell response in a subject in need thereof or treating a tumor of a subject, the method comprising: administering an effective amount of a mixed population of modified T cells or a composition of a mixed population of modified T cells, described herein, to the subject to provide a T cell response such that the CAR T cell is expanded in the blood of the subject via cells expressing CD19. In embodiments, the method may further comprise infusing B cells into the subject to continue to activate and/or expand the CAR T cells. For example, the B cells of the subject or genetically modified B cells from healthy donor may be obtained and stored before CAR T cell infusion. In embodiments, the method may further comprise administering a cell expressing CD19 or a polypeptide comprising at least an extracellular domain of CD19 or the antigen that the CAR T cells recognize. For example, the cell expressing CD19 may include cell lines such as K562 and NK92 that are transduced with nucleic acid sequences encoding CD19. In embodiments, the method may further comprise identifying CAR T cells expressing both first and second CAR, as well as administering the identifier CAR T cells to the subject. For example, MUC1 may be associated as a sorting marker such that CAR T cells expressing MUC1 may be identified timely.

[0241] In embodiments, the tumor associated MUC1 (tMUC1) is expressed on tumor cells, but not on corresponding non-malignant cells. In embodiments, a scFv against the tumor associated MUC1 directly interacts with an o-glycosylated GSTA motif (SEQ ID NO. 88).

[0242] In embodiments, the present disclosure describes a method of in vivo cell expansion and maintenance. In embodiments, the method may include administering an effective amount of a mixed population of modified T cells described herein to the subject in need thereof to provide a T cell response; and administering an effective amount of presenting cells (e.g., T cells) expressing a soluble agent that an extracellular domain of the CAR recognizes. In embodiments, the method may be implemented to enhance T cell response in a subject in need thereof. The method may include administering an effective amount of a mixed population of modified T cells comprising a CAR to the subject to provide a T cell response and administering an effective amount of presenting cells expressing a soluble agent that an extracellular domain of the CAR recognizes to enhance the T cell response in the subject. In certain embodiments, the presenting cells are T cells, dendritic cells, and/or antigen presenting cells. In certain embodiments, the enhancing T cell response in the subject may include selectively enhancing proliferation of T cell comprising the CAR. In embodiments, the method may be used to enhance treatment of a condition of a subject using modified T cells. The method may include administering a population of cells that express an agent or administering an agent that is formulated as a vaccine. In these instances, the modified T cells include a nucleic acid that encodes a CAR, and an extracellular domain of the CAR recognize the agent. In embodiments, the method may be implemented to enhance proliferation of the modified T cells in a subject having a disease. The method may include preparing the modified T cells comprising a CAR; administering an effective amount of the modified T cells to the subject; introducing, into cells, a nucleic acid encoding an agent that an extracellular domain of the CAR recognizes; and administering an effective amount of the cells (introduced with the nucleic acid encoding the agent) to the subject. In embodiments, the T cell expansion may be measured based on an increase in copy number of CAR molecules in genomic DNA of the T cells. In embodiments, the T cell expansion may be measured based on flow cytometry analysis on molecules expressed on the T cells.

[0243] Embodiments described herein relate to mixed population of modified T cells comprising a first CAR and a second CAR or TCR in separate T cells and/or in the same T cells, wherein an antigen binding domain of the first CAR binds an antigen such as CD19, CD33, CD14, and BCMA, and an antigen binding domain of the second CAR binds a tumor associated MUC. In embodiments, the tumor associated MUC is MUC1 (for example tMUC1) or MUC2. Embodiments described herein relate to a composition comprising a mixed population of the modified T cells and to a method of enhancing T cell response in a subject in need thereof or treating a tumor of a subject, the method comprising: administering an effective amount of the mixed population of modified T cells.

[0244] In embodiments, the first CAR comprises the amino acid sequence of SEQ ID NO: 207, and the second CAR comprises the amino acid sequence of SEQ ID: 202. In embodiments, the first CAR comprises the amino acid sequence of SEQ ID NO: 203, 207, 216, or 219, and the second CAR comprises the amino acid sequence of SEQ ID: 202 or 205. In embodiments, the antigen binding domain of the second CAR comprises the amino acid sequence of SEQ ID NO: 70. In embodiments, the antigen binding domain of the second CAR comprises the amino acid sequence of SEQ ID NO: 5 or 6. In embodiments, the a modified T cell described herein comprises a nucleic acid sequences of SEQ ID NO: 201, 204, 206, 208, 215, 217, 218, or 220. In embodiments, each of the first CAR and the second CAR comprises an antigen binding domain, a transmembrane domain, and a cytoplasmic domain.

[0245] In embodiments, the cytoplasmic domain of the CAR molecules described herein comprise a co-stimulatory domain and a CD3 zeta domain. In embodiments, the CAR molecules described herein may include a co-stimulatory domain without a corresponding component of CD3 zeta domain. In embodiments, the CAR molecules described herein may include a CD3 zeta domain without a co-stimulatory domain.

[0246] In embodiments, the modified cell comprises a dominant negative variant of a receptor of programmed death 1 (PD-1), cytotoxic T lymphocyte antigen-4 (CTLA-4), B- and T-lymphocyte attenuator (BTLA), T cell immunoglobulin mucin-3 (TIM-3), lymphocyte-activation protein 3 (LAG-3), T cell immunoreceptor with Ig and ITIM domains (TIGIT), leukocyte-associated immunoglobulin-like receptor 1 (LAIRI), natural killer cell receptor 2B4 (2B4), or CD 160. In embodiments, the modified cell further comprises a nucleic acid sequence encoding a suicide gene, and/or the suicide gene comprises a HSV-TK suicide gene system. In embodiments, the isolated T cell comprises a reduced amount of TCR, as compared to the corresponding wide-type T cell.

[0247] Dominant negative mutations have an altered gene product that acts antagonistically to the wild-type allele. These mutations usually result in an altered molecular function (often inactive) and are characterized by a dominant or semi-dominant phenotype. In embodiments, the modified cells described herein comprise the dominant negative (DN) form of the PD-1 receptor. In embodiments, the expression of the DN PD-1 receptor in the modified cells described herein is regulated by an inducible gene expression system. In embodiments, the inducible gene expression system is a lac system, a tetracycline system, or a galactose system.

[0248] The present disclosure describes pharmaceutical compositions. The pharmaceutical compositions include one or more of the following: CAR molecules, TCR molecules, modified CAR T cells, modified cells comprising CAR or TCR, mix population of modified cells, nucleic acids, and vectors described herein. Pharmaceutical compositions are administered in a manner appropriate to the disease to be treated (or prevented). The quantity and frequency of administration will be determined by such factors as the condition of the patient, and the type and severity of the patient's disease, although appropriate dosages may be determined by clinical trials.

[0249] The term “pharmaceutically acceptable” means approved by a regulatory agency of the U.S. Federal or a state government or the EMA (European Medicines Agency) or listed in the U.S. Pharmacopeia Pharmacopeia (United States Pharmacopeia-33/National Formulary-28 Reissue, published by the United States Pharmacopeia Convention, Inc., Rockville Md., publication date: April 2010) or other generally recognized pharmacopeia for use in animals, and more particularly in humans.

[0250] The term “carrier” refers to a diluent, adjuvant {e.g., Freund's adjuvant (complete and incomplete)), excipient, or vehicle with which the therapeutic is administered. Pharmaceutical carriers can be sterile liquids, such as water and oils, including those of petroleum, animal, vegetable or synthetic origin, such as peanut oil, soybean oil, mineral oil, sesame oil and the like. Water is a preferred carrier when the pharmaceutical composition is administered intravenously. Saline solutions and aqueous dextrose and glycerol solutions can also be employed as liquid carriers, particularly for injectable solutions.

[0251] The present disclosure also describes a pharmaceutical composition comprising the first and the second population of cells, described herein. The pharmaceutical composition described herein, comprising a first population of cells comprising a first antigen binding molecule and a second population of cells comprising a second antigen binding domain, are suitable for cancer therapy. For example, the binding of first antigen binding molecule with an antigen enhances expansion of the cells suitable for cancer therapy.

[0252] The present disclosure also describes a method for enhancing cancer therapy using the cells described herein that are suitable for cancer therapy. The method comprises administering an effective amount of a first composition to the subject having a form of cancer expressing a tumor antigen, the first composition comprising a first population of cells (e.g., T cells) comprising a first antigen binding molecule (e.g., CAR) binding a first antigen; and administering an effective amount of a second composition to the subject, the second composition comprising a population of the cells comprising a second antigen binding molecule. Administration of the first and second compositions can be performed simultaneously or separately, for example sequentially. More information about the cells suitable for cancer therapy can be found at Eyileten et al., Immune Cells in Cancer Therapy and Drug Delivery, Mediators Inflamm. 2016; 2016: 5230219, which is incorporated herein for reference.

[0253] In embodiments, the method comprises administering an effective amount of a population of CAR T cells binding a WBC antigen; and administering an effective amount of a population of CAR T cells binding a solid tumor antigen. In embodiments, the method comprises administering an effective amount of a population of CAR T cells binding a WBC antigen; and administering an effective amount of a population of T cells binding a solid tumor antigen (T cells used in TCR and TIL therapies). In embodiments, the method comprises administering an effective amount of a population of CAR T cells binding a WBC antigen; and administering an effective amount of a population of NK cells or NK cells expressing CAR binding a solid tumor antigen. In embodiments, the method comprises administering an effective amount of a population of CAR T cells binding a WBC antigen; and administering an effective amount of a population of NK cells or NK cells expressing CAR binding a solid tumor antigen. In embodiments, the method comprises administering an effective amount of a population of CAR T cells binding a WBC antigen; and administering an effective amount of a population of DCs or DCs expressing CAR binding a solid tumor antigen. In embodiments, the method comprises administering an effective amount of a population of CAR T cells binding a WBC antigen; and administering an effective amount of a population of macrophages or macrophages expressing CAR binding a solid tumor antigen. In embodiments, the method comprises administering an effective amount of a population of CAR T cells binding a WBC antigen; and administering an effective amount of a population of neutrophils or neutrophils expressing CAR binding a solid tumor antigen. In embodiments, the method comprises administering an effective amount of a population of CAR T cells binding a WBC antigen; and administering an effective amount of a population of lymphocytes binding or targeting a solid tumor antigen. In embodiments, the solid tumor antigen can be located on the cell surface (e.g., TSHR), on the extracellular matrix of tumor microenvironment (e.g., αvβ5 integrin), and/or inside of tumor cells (e.g., gp100).

[0254] When “an immunologically effective amount”, “an anti-tumor effective amount”, “a tumor-inhibiting effective amount”, or “a therapeutically effective amount” is indicated, the precise amount of the compositions of the present disclosure to be administered can be determined by a physician with consideration of individual differences in age, weight, tumor size, extent of infection or metastasis, and condition of the patient (subject). It can be stated that a pharmaceutical composition comprising the modified cells described herein may be administered at a dosage of 10⁴ to 10⁹ cells/kg body weight, preferably 10⁵ to 10⁶ cells/kg body weight, including all integer values within those ranges. Modified cell compositions may also be administered multiple times at these dosages. The cells can be administered by using infusion techniques that are commonly known in immunotherapy (see, e.g., Rosenberg et al., New Eng. J. of Med. 319:1676, 1988). The optimal dosage and treatment regime for a particular patient can readily be determined by one skilled in the art of medicine by monitoring the patient for signs of disease and adjusting the treatment accordingly. In certain embodiments, it may be desired to administer activated T cells to a subject and then subsequently redraw the blood (or have apheresis performed), collect the activated and expanded T cells, and reinfuse the patient with these activated and expanded T cells. This process can be carried out multiple times every few weeks. In certain embodiments, T cells can be activated from blood draws of from 10 cc to 400 cc. In certain embodiments, T cells are activated from blood draws of 20 cc, 30 cc, 40 cc, 50 cc, 60 cc, 70 cc, 80 cc, 90 cc, or 100 cc. Not to be bound by theory, using this multiple blood draw/multiple reinfusion protocols, may select out certain populations of T cells.

[0255] In embodiments, a mixed population of therapeutically effective amount of modified cells can be administered to the subject in need thereof sequentially or simultaneously. As an example, for a mixed population of two different modified cells, a therapeutically effective amount of the modified cells containing the antigen binding domain for expanding and/or maintaining the modified cells can be administered before, after, or at the same time a therapeutically effective amount of the modified cells containing the antigen binding domain for killing a target cell. As another example of a mixed population of two different modified cells, a therapeutically effective amount of the modified cells containing the antigen binding domain for killing a target cell can be administered before, after, or at the same time a therapeutically effective amount of the modified cells containing both the antigen binding domains of expanding and/or maintaining the modified cells and of killing a target cell (in a single modified cell). As an example, for a mixed population of three different modified cells including (1) modified cells containing an antigen binding domain for expanding and/or maintaining the modified cells, (2) modified cells containing an antigen binding domain for killing a target cell, and (3) modified cells containing both the antigen binding domains of expanding and/or maintaining the modified cells and of killing a target cell (in a single modified cell), a therapeutically effective amount of (1), (2), and (3) can be administered sequentially in any order (1, 2, 3; 2, 3, 1; 3, 1, 2; 1, 3, 2; 2, 1, 3; or 3, 2, 1) or simultaneously (1+2+3 at the same time). Moreover, two of the three modified cells can be combined and administered together with the third one being administered before or after the combination. For example, the combination of (1) and (2) can be administered before or after (3); or the combination of (1) and (3) can be administered before or after (2); or the combination of (2) and (3) can be administered before or after (1).

[0256] The administration of the pharmaceutical compositions described herein may be carried out in any convenient manner, including by aerosol inhalation, injection, ingestion, transfusion, implantation, or transplantation. The compositions described herein may be administered to a patient subcutaneously, intradermally, intratumorally, intranodally, intramedullary, intramuscularly, by intravenous (i. v.) injection, or intraperitoneally. In embodiments, the modified cell compositions described herein are administered to subjects by intradermal or subcutaneous injection. In embodiments, the T cell compositions of the present disclosure are administered by i.v. injection. The compositions of modified cells may be injected directly into a tumor, lymph node, or site of infection. In embodiments, cells activated and expanded using the methods described herein, or other methods known in the art where T cells are expanded to therapeutic levels, are administered to patients in conjunction with (e.g., before, simultaneously or following) any number of relevant treatment modalities, for example as a combination therapy, including but not limited to treatment with agents for antiviral therapy, cidofovir and interleukin-2, Cytarabine (also known as ARA-C); or natalizumab treatment for MS patients; or efalizumab treatment for psoriasis patients or other treatments for PML patients. In further embodiments, the T cells described herein can be used in combination with chemotherapy, radiation, immunosuppressive agents, such as cyclosporin, azathioprine, methotrexate, mycophenolate, and FK506, antibodies, or other immunoablative agents such as CAM PATH, anti-CD3 antibodies or other antibody therapies, cytoxin, fludaribine, cyclosporin, FK506, rapamycin, mycophenolic acid, steroids, FR901228, cytokines, and irradiation. These drugs inhibit either the calcium dependent phosphatase calcineurin (cyclosporine and FK506) or inhibit the p70S6 kinase that is important for growth factor induced signaling (rapamycin). (Liu et al., Cell 66:807-815, 1991; Henderson et al., Immun 73:316-321, 1991; Bierer et al., Curr. Opin. Immun 5:763-773, 1993; Isoniemi (supra)). In embodiments, the cell compositions described herein are administered to a subject in conjunction with (e.g., before, simultaneously or following) bone marrow transplantation, T cell ablative therapy using either chemotherapy agents such as, fludarabine, external-beam radiation therapy (XRT), cyclophosphamide, or antibodies such as OKT3 or CAMPATH. In embodiments, the cell compositions described herein are administered following B-cell ablative therapy. For example, agents that react with CD20, e.g., Rituxan may be administered to patients. In embodiments, subjects may undergo standard treatment with high dose chemotherapy followed by peripheral blood stem cell transplantation. In certain embodiments, following the transplant, subjects receive an infusion of the expanded immune cells of the present disclosure. In embodiments, expanded cells are administered before or following surgery. The dosage of the above treatments to be administered to a subject in need thereof will vary with the precise nature of the condition being treated and the recipient of the treatment. The scaling of dosages for human administration can be performed according to art-accepted practices by a physician depending on various factors. Additional information on the methods of cancer treatment using modified cells is provided in U.S. Pat. No. 8,906,682, incorporated by reference in its entirety.

[0257] Embodiments described herein relate to an in vitro method for preparing modified cells. The method may include obtaining a sample of cells from a subject. For example, the sample may include T cells or T cell progenitors. The method may further include transfecting the sample of cells with a DNA encoding at least a CAR and culturing the sample of cells ex vivo in a medium that selectively enhances proliferation of CAR-expressing T cells. The sample of cells can be a mixed population of modified cells described herein.

[0258] In embodiments, the sample is a cryopreserved sample. In embodiments, the sample of cells is from umbilical cord blood or a peripheral blood sample from the subject. In embodiments, the sample of cells is obtained by apheresis or venipuncture. In embodiments, the sample of cells is a subpopulation of T cells.

[0259] Embodiments of the present disclosure relate to a Zinc Finger Nuclease (ZFN) comprising a DNA-binding domain comprising zinc finger DNA binding proteins and a DNA-cleaving domain comprising a cleavage domain and/or a cleavage half-domain. The zinc finger DNA binding proteins may include 1, 2, 3, 4, 5, 6 or more zinc fingers, each zinc finger having a recognition helix that binds a target subsite in the target gene. In embodiments, the zinc finger proteins comprise 3, 4, 5, 6 fingers (where the fingers are designated F1, F2, F3, F4, F5 and F6 and are ordered F1 to F3, F4 or F5 or F6 from the N-terminus to the C-terminus), and the fingers comprise the amino acid sequence of the recognition regions shown in Table 5. Examples of cleavage domains and/or cleavage half-domains include wild-type or engineered FokI cleavage half-domain. In embodiments, the DNA cleaving domain comprises a wild-type cleavage domain or cleavage half-domain (e.g., a FokI cleavage half-domain). In embodiments, the cleavage domain and/or cleavage half-domain comprise engineered (non-naturally occurring) cleavage domains or cleavage half-domains, for example, engineered FokI cleavage half-domains that form obligate heterodimers. In embodiments, the gene is a human gene. In embodiments, the cleavage domain comprises a wild-type or engineered FokI cleavage domain. Embodiments relate to a polynucleotide encoding the isolated ZFN as described herein. Embodiments relate to a vector comprising the polynucleotide. In embodiments, the vector is an adenoviral or lentiviral vector. Embodiments relate to an isolated cell or a cell line comprising the isolated ZFN described herein. In embodiments, the isolated cell is a stem cell, a T cell, or a Natural Killer (NK) cell. In embodiments, the cell is a T cell derived from a primary human T cell isolated from a human donor. In embodiments, the cell has reduced expression of an endogenous gene of CTLA4, LAG3, BTLA, TIM3, FOXP3, SIVA1, or LGALS9. In embodiments, various gene editing techniques or overexpression techniques (e.g., Cas9, TALEN, and ZFN) can be used to regulate T/NK cell functions by knocking out, knocking down, overexpressing, or inserting one or more genes. For example, the modified cell has reduced or increased expression of one or more genes of a biosynthesis or transportation pathway of a peptide in List 1 and List 2 (see Paragraph 268), as compared to the corresponding wild-type cell. In embodiments, the target gene is Runx3. For example, the modified T/NK cell has increased expression of Runx3 as compared to the corresponding wild-type cell. As an example, the increased expression of Runx3 helps the infiltration of T cells or their long-term residence within tumor cells, therefore increasing T cell killing effects. In embodiments, the modified cell is a modified stem cell, a modified T cell, or a modified Natural Killer (NK) cell. In embodiments, the modified cell is a T cell derived from a primary human T cell isolated from a human donor. In embodiments, the cell has a reduced expression of an endogenous gene of CTLA4, LAG3, BTLA, TIM3, FOXP3, SIVA1, and LGALS9.

[0260] CTLA4 is an inhibitory receptor acting as a major negative regulator of T-cell responses. T lymphocyte receptor CTLA-4 binds co-stimulatory molecules CD80 (B7-1) and CD86 (B7-2) with higher avidity than stimulatory co-receptor CD28 and negatively regulates T cell activation. LAG3 is a member of the immunoglobulin superfamily and is expressed on the surface of activated T and NK cells. LAG3 has also been detected on the surface of B cells, dendritic cells, TILs and Tregs. Blockage of LAG3 significantly increases T cell proliferation and function. TIM3 is an immune checkpoint receptor constitutively expressed by CD4+ T helper 1 (Th1), CD8+ T cytotoxic 1 cells (Tc1) and Th17 cells. The interaction between TIM3 and its ligand galectin-9 LGALS9 is believed to result in suppression of T-cell responses. FOXP3 is a member of the forkhead/winged-helix family of transcriptional regulators, which is crucial for the development and inhibitory function of regulatory T-cells (Treg). SIVA1 induces CD27-mediated apoptosis, inhibits BCL2L1 isoform Bcl-x(L) anti-apoptotic activity, inhibits activation of NF-kappa-B, and promotes T-cell receptor-mediated apoptosis.

[0261] Embodiments relate to modified cells comprising isolated nucleic acid sequence encoding a chimeric antigen receptor (CAR), wherein an endogenous gene is inactivated using the ZFN.

[0262] In embodiments, the CAR comprises an antigen binding domain, a transmembrane domain, a co-stimulatory domain, and a CD3 zeta signaling domain.

[0263] In embodiments, the modified T cell has a reduced graft-versus-host disease (GVHD) response in a bioincompatible human recipient as compared to the GVHD response of the primary human T cell.

[0264] In embodiments, the antigen binding domain of the CAR binds FZD10, TSHR, PRLR, Muc17, GUCY2C, CD207, CD19, or CD20.

[0265] In embodiments, the antigen binding domain of the CAR binds at least one of B7, BCMA, CAIX, CD123, CD133, CD138, CD171, CD171/L1-CAM, CD19, CD2, CD22, CD30, CD33, CEA, cMet, CS1, CSPG4, Dectin1, EGFR, EGFR vIII, EphA2, ERBB receptors, ErbB T4, ERBB2, FAP, Folate receptor 1, FITC, Folate receptor 1, GD2, GPC3, HA-1 H/HLA-A2, HER2, IL-11Ra, IL13 receptor a2, IL13R, IL13Rα2 (zetakine), Kappa, LewisY, Mesothelin, MUC1, NKG2D, NY-ESO-1, PSMA, ROR-1, TRAIL-receptor1, or VEGFR2.

[0266] In embodiments, the co-stimulatory domain of the CAR comprises the intracellular domain of a co-stimulatory molecule selected from the group consisting of CD27, CD28, 4-1BB, OX40, CD30, CD40, PD-1, ICOS, lymphocyte function-associated antigen-1 (LFA-1), CD2, CD7, LIGHT, NKG2C, B7-H3, and any combination thereof.

[0267] In embodiments, the modified cells include a nucleic acid sequence encoding hTERT or a nucleic acid encoding SV40LT, or a combination thereof. In embodiments, the modified cells include a nucleic acid sequence encoding hTERT and a nucleic acid encoding SV40LT. In embodiments, the expression of hTERT is regulated by an inducible expression system. In embodiments, the expression of SV40LT gene is regulated by an inducible expression system. In embodiments, the inducible expression system is rTTA-TRE, which increases or activates the expression of SV40LT gene or hTERT gene, or a combination thereof. In embodiments, the modified cells include a nucleic acid sequence encoding a suicide gene. In embodiments, the suicide gene includes an HSV-TK suicide gene system. In these instances, the modified cell can be induced to undergo apoptosis.

[0268] The present disclosure describes methods of treating cancer in a subject, the methods comprising administering a mixed population of modified cells described herein to the subject, wherein the cancer is selected from the group consisting of a lung carcinoma, pancreatic cancer, liver cancer, bone cancer, breast cancer, colorectal cancer, leukemia, ovarian cancer, lymphoma, and brain cancer.

[0269] The methods described herein include a modified T cell and/or modified NK cell comprising a reduced amount of one or more peptides including PD1, PDL1, PDL2, CTLA4, LRBA, LAG3, Tim3, BILA, CD160, 2B4, SOCS1, SOCS3, Foxp3, CCR4, PVRIG, CD16B, SIVA1, CD33, LAGLS9, CD122, IDO1, CD45, Cvp1b1, TNFAIP8L2, ID02, TD02, DNMT3A, and/or Ceacam-1 (List 1), as compared to a corresponding wild-type cell. In embodiments, the methods of treating cancer in a subject including enhancing the modified T cell and/or NK cell response of these T cells and/or NK cells (having a reduced amount of one or more peptides listed immediately above) when the mixed population of genetically modified T cells is administrated into a subject The methods include a modified T cell and/or modified NK cell comprising an increased amount of one or more peptides including Runx3, Iexm, PILRA, Ptnns1L3, Fcgr3a, Nat8, Ccl9, Hck, Trem2, Ccl6, Cd36, Igf1, Ctss, Gzmc, Bad, Cxcl2, TNFAIP8L3, II1b, TRPV1, TRPV2, TRPV3, TRPV4, Rgs1, PLSCR1, ITGB2, C3AR1, ITGA3, ITGA5, ITGAL, batf, batf3, Cxcl2, CARD11, and/or CD83 (List 2), as compared to a corresponding wild-type cell. In embodiments, the methods of treating cancer in a subject include enhancing the T cell and/or NK cell response of these T cells and/or NK cells (having an increased amount of the one or more peptides listed immediately above) when the modified T cells and/or modified NK cells are administrated to a subject. In embodiments, various gene editing techniques or overexpression techniques (e.g., Cas9, TALEN, and ZFN) may be used to regulate the functions of T cell and/or NK cell by knocking out/knocking down/overexpressing/inserting one or more genes encoding one or more peptides in list 1 or 2. For example, the genetically modified T cell has reduced or increased expression of one or more genes of a biosynthesis or transportation pathway of a peptide in list 1 and list 2 (see above), as compared to the corresponding wild-type cell.

[0270] In embodiments, the target gene is Runx3. For example, the modified T cells have increased expression of Runx3 as compared to the corresponding wild-type cell. In these instances, the increased expression of Runx3 may help, for example, the infiltration or long-term residence of the modified T cells within the tumor cells, therefore increasing T cell killing effects.

[0271] For example, T cell response in a subject refers to cell-mediated immunity associated with helper, killer, regulatory, and other types T cells. For example, T cell response may include activities such as assistance to other white blood cells in immunologic processes and identifying and destroying virus-infected cells and tumor cells. T cell response in the subject may be measured via various indicators such as a number of virus-infected cells and/or tumor cells that the T cells kill, an amount of cytokines that the T cells release in co-culturing with virus-infected cells and/or tumor cells, a level of proliferation of the T cells in the subject, a phenotype change of the T cells (e.g., changes to memory T cells), and the longevity or the length of the lifetime of the T cells in the subject.

[0272] T cell response also includes the release of cytokines. Although cytokine release is often associated with systemic inflammation and complication of disease, the release of cytokines appears to be also associated with the efficacy of a CAR T cell therapy. The release of cytokines may correlate with expansion and progressive immune activation of adoptively transferred cells, such as in CAR T cell therapy. The present disclosure describes the release of effector cytokines, such as IFN-γ, and pro- and anti-inflammatory cytokines, such as IL-6, in response to mixed population of modified T cells described herein, especially in response to the presence of a first CAR including an antigen binding domain for expanding cells and a second CAR or TCR including an antigen binding domain for killing a target cell. In embodiments, the present disclosure describes the release of IL-6 and IFN-γ in a subject introduced with the first CAR and second CAR or TCR described herein. In embodiments, the subject is in need of cancer treatment, and the cancer treatment is pancreatic cancer treatment. In embodiments, the present disclosure describes determining the efficacy or monitoring the efficacy of a CAR T cell therapy by measuring the level of cytokine release. In embodiments, the release of cytokines (e.g., IL-6 and/or IFN-γ) in the subject in response to CAR T cell therapy using mixed population of modified T cells described herein is more than that using T cells comprising the second CAR without the first CAR.

[0273] In embodiments, the modified cells described herein may further comprise a dominant negative variant of a receptor of programmed death 1 (PD-1), cytotoxic T lymphocyte antigen-4 (CTLA-4), B- and T-lymphocyte attenuator (BTLA), T cell immunoglobulin mucin-3 (TIM-3), lymphocyte-activation protein 3 (LAG-3), T cell immunoreceptor with Ig and ITIM domains (TIGIT), leukocyte-associated immunoglobulin-like receptor 1 (LAIRI), natural killer cell receptor 2B4 (2B4), or CD 160 such that the T cell response induced by the mixed population of modified cells may be enhanced. In embodiments, the modified cells described herein may further comprise a nucleic acid sequence encoding a suicide gene, and/or a suicide gene comprising an HSV-TK suicide gene system such that the fate of the modified cell may be controlled. For example, the T cell can be induced to undergo apoptosis if the therapy imposes risks to the subject, and/or the subject encounters adverse effects, or if the therapy has been completed, a certain required condition has been met, and/or a predetermined time has passed.

[0274] The present disclosure describes a composition comprising a mixed population of modified cells described herein. In embodiments, there is a first population of modified cells comprising a first CAR binding a first antigen, and a second population of modified cells comprising a second CAR or TCR binding a second antigen that is different from the first antigen. The first antigen can be an antigen of a WBC, such as a B cell, while the second antigen is a tumor antigen. The present disclosure describes a method of enhancing expansion and maintenance of the second population of modified cells for killing tumor cells. The method includes administering an effective amount of the composition comprising a mixed population of modified cells to a subject having a form of cancer associated with the tumor antigen which the second CAR recognizes and binds. Embodiments also include a method of enhancing T cell response in a subject in need thereof or treating a subject having cancer. The method includes administering an effective amount of the composition described herein to the subject having a form of cancer associated with the tumor antigen which the second CAR recognizes and binds. Further the embodiments include a method of enhancing expansion and/or maintenance of modified cells in a subject, the method comprising: contacting T cells with a first vector comprising a first nucleic acid sequence encoding the first CAR and a second vector comprising a second nucleic acid sequence encoding the second CAR to obtain the composition described herein of a mixed population of modified cells; and administering an effective amount of the composition to the subject having a form of cancer associated with the tumor antigen which the second CAR recognizes and binds. Additional embodiments include a method of enhancing T cell response in a subject in need thereof or treating a subject having cancer, the method comprising: contacting T cells with a first vector comprising a first nucleic acid sequence encoding the first CAR and a second vector comprising a second nucleic acid sequence encoding the second CAR to obtain the composition described herein of a mixed population of modified cells; and administering an effective amount of the composition to the subject having a form of cancer associated with the tumor antigen, which the second CAR recognizes and binds. Embodiments include a method of enhancing expansion and maintenance of the modified cells in a subject, the method comprising: administering an effective amount of the composition described herein of a mixed population of modified cells.

[0275] In embodiments, the composition comprises at least the first population and second population of modified cells. The first population of modified cells comprises a polynucleotide encoding the first CAR (e.g., CD19, CD22, and BCMA CARs) and a polynucleotide encoding one or more cytokines (e.g., IL-6, IL12, and IFNγ). The second population of modified cells comprises a polynucleotide encoding the second CAR binding a solid tumor antigen. For example, the composition comprises the first population, the second, the third, and the fourth populations of modified cells. The first population of modified cells comprises a polynucleotide encoding CAR binding a WBC antigen and IL-6 (e.g., FIG. 87B). The second population of modified cells comprises a polynucleotide encoding CAR binding a solid tumor antigen (e.g., FIG. 87A). The third population of modified cells comprises a polynucleotide encoding CAR binding a WBC antigen and IL-12 (e.g., FIG. 87B). The fourth population of modified cells comprises a polynucleotide encoding CAR binding a WBC antigen and IFNγ (e.g., FIG. 87B). These WBC antigens can be the same (e.g., CD19) or different (e.g., CD19 and BCMA). The first, the third, and the fourth populations of modified cells can be mixed based on a first predetermined ratio to obtain a group of modified cells, which can be then mixed based on a second predetermined ratio with the second population of modified cells to obtain a composition comprising a mixed population of modified cells. The predetermined ratio is used to control the amount of expression of the one or more cytokines in the subject to achieve controllable, lasting, and efficient cytokine effects in the subject while having less cytotoxicity. In embodiments, the first predetermined ratio ratio the first, the third, and the fourth populations of modified cells is set such that there are more of modified cells comprising the polynucleotide encoding IFNγ than the modified cells comprising the polynucleotide encoding IL-12 or IL-6. For example, the first predetermined ratio is 1:1:10. In embodiments, the second predetermined ratio is determined such that there are more of the modified cells comprising the polynucleotide encoding the second CAR (e.g., the second population of modified cells) than the modified cells comprising the polynucleotide encoding the first CAR (e.g., the first, the second, and/or the third populations of modified cells). For example, the second predetermined ratio of the first population of modified cells and the second population of modified cells is less than 1:1 but more than 1:10,000. In embodiments, the second predetermined ratio is 1:1, 1:10, 1:100, 1:1000, and 1:104, as well as individual numbers within that range, for example, 1:10, 1:100, or 1:1000. In embodiments, the second predetermined ratio is between 1:10 and 1:1000. In embodiments, the second predetermined ratio is between 1:10 and 1:100. In embodiments, the second predetermined ratio is between 1:1 and 1:100. In embodiments, the cells (e.g., NK cells, T cells, B cells, myeloid-derived cells, etc.) are obtained from a subject or a healthy donor and divided into at least two groups. These groups of cells may be transferred with two or more vectors, respectively. These cells can be further modified if obtained from a healthy donor. In embodiments, the second population of modified cells does not express the one or more cytokines.

[0276] In embodiments, a polynucleotide encoding the first CAR is present in the modified cell in a recombinant DNA construct, in an mRNA, or in a viral vector. In embodiments, the polynucleotide is an mRNA, which is not integrated into the genome of the modified cell, such that the modified cell expresses the first CAR (e.g., CD19 CAR) for a finite period of time.

[0277] In embodiments, the mixed population of modified cells further includes a third population of modified cells expressing a third CAR and/or a fourth population of modified cells expressing a fourth CAR such that immune responses caused by the various population of modified cells can be coupled to boost CAR T treatment. In embodiments, CARs may be replaced by TCRs or a combination of CAR and TCR.

[0278] Embodiments relate to a method of enhancing CAR T therapy by implementing multiple infusion of CAR T cells timely. The method includes obtaining PBMC from a subject or a healthy donor, preparing CAR T cells using the obtained PBMC, culturing the CAR T cells, for example, for a predetermined amount of time, administering a portion of the cultured CAR T cells to the subject, observing and/or measuring the CAR T cells in the blood of the subject, administering a second portion of the cultured CAR T cells when the level of the CAR T cells in the blood reaches a predetermined value or when the CAR T cells home to an organ (e.g., lymph node). For example, the first infused CAR T cells can be selectively activated and expanded in the organ and cause an immune response by the subject. Thus, infusion of the second portion of CAR T cells can be coupled with the immune response to enhance the activation and/or expansion of the second population of CAR T cells, thus enhancing the CAR T therapy.

[0279] The present disclosure describes a composition including a population of modified cells including a first population of modified cells that comprises a first CAR without a second CAR, and/or a second population of modified cells that comprises a second CAR without a first CAR. The present disclosure also describes a composition including a population of modified cells comprising the first CAR and second CAR (in a single modified cell). In embodiments, the composition includes a first and a second population of modified cells and a third population of modified cells comprising one or more nucleic acid sequences encoding the first CAR and the second CAR in the same modified cell. In embodiments, the composition comprises a second population of modified cells, in the absence of a first population of genetically modified cells, and a third population of modified cells comprising one or more nucleic acid sequences encoding the first CAR and the second CAR in the same modified cells.

[0280] Embodiments relate to a method of using or the use of polynucleotide encoding the antigen binding molecule and/or therapeutic agent(s) to enhance the expansion of the modified cells or to enhance the T cell response in a subject. The method or use includes: providing a viral particle (e.g., AAV, lentivirus or their variants) comprising a vector genome, the vector genome comprising the polynucleotide, wherein the polynucleotide is operably linked to an expression control element conferring transcription of the polynucleotide; and administering an amount of the viral particle to the subject such that the polynucleotide is expressed in the subject. In embodiments, the AAV preparation may include AAV vector particles, empty capsids and host cell impurities, thereby providing an AAV product substantially free of AAV empty capsids. More information of the administration and preparation of the viral particle may be found at the U.S. Pat. No. 9,840,719 and Milani et al., Sci. Transl. Med. 11, eaav7325 (2019) 22 May 2019, which are incorporated herein by reference.

[0281] In embodiments, the polynucleotide may integrate into the genome of the modified cell and the progeny of the modified cell will also express the polynucleotide, resulting in a stably transfected modified cell. In embodiments, the modified cell expresses the polynucleotide encoding the CAR but the polynucleotide does not integrate into the genome of the modified cell such that the modified cell expresses the transiently transfected polynucleotide for a finite period of time (e.g., several days), after which the polynucleotide is lost through cell division or other factors. For example, the polynucleotide is present in the modified cell in a recombinant DNA construct, in an mRNA, or in a viral vector, and/or the polynucleotide is an mRNA, which is not integrated into the genome of the modified cell.

[0282] In embodiments, the first population of cells comprises the first CAR and the second CAR, and the second population of cells comprises the first CAR but does not comprise the second CAR. In embodiments, the first population of cells comprises the first CAR and the second CAR, and the second population of cells comprises the first CAR and the second CAR. In embodiments, first population of cells comprises the first CAR but does not comprise the second CAR, the second population of cells comprises the first CAR and the second CAR. In embodiments, the first population of cells comprises the first CAR but does not contain the second CAR, and the second population of cells comprise the second CAR but does comprise first CAR. In embodiments, first population of cells comprises the second CAR but does not comprise the first CAR and the second population of cells comprises the first CAR and the second CAR. In embodiments, the first population of cells comprises the first CAR but does not comprise the second CAR; the second population comprises a second CAR but does not comprise the first CAR; and a third population comprises the first CAR and the second CAR. As described herein, the first CAR includes an antigen binding domain for expanding and/or maintaining the modified cells, and the second CAR includes an antigen binding domain for killing target cells, such as tumors.

[0283] In embodiments, the antigen binding domain binds an antigen that is or that comprises a cell surface molecule of a white blood cell (WBC), a tumor antigen, or a solid tumor antigen. In embodiments, the WBCs are T cells, NK cells, or dendritic cells.

[0284] In embodiments, the WBC is a granulocyte, a monocyte, or lymphocyte. In embodiments, the WBC is a B cell. In embodiments, the cell surface molecule or antigen of the B cell is CD19, CD22, CD20, BCMA, CD5, CD7, CD2, CD16, CD56, CD30, CD14, CD68, CD11b, CD18, CD169, CD1c, CD33, CD38, CD138, or CD13. In embodiments, the cell surface molecule or antigen of the B cell is CD19, CD20, CD22, or BCMA. In embodiments, the cell surface molecule or antigen of the B cell is CD19.

[0285] In embodiments, the tumor antigen is a solid tumor antigen. In embodiments, the solid tumor antigen is tMUC1, PRLR, CLCA1, MUC12, GUCY2C, GPR35, CR1L, MUC 17, TMPRSS11B, MUC21, TMPRSS11E, CD207, SLC30A8, CFC1, SLC12A3, SSTR1, GPR27, FZD10, TSHR, SIGLEC15, SLC6A3, KISS1R, QRFPR, GPR119, CLDN6, UPK2, ADAM12, SLC45A3, ACPP, MUC21, MUC16, MS4A12, ALPP, CEA, EphA2, FAP, GPC3, IL13-Rα2, Mesothelin, PSMA, ROR1, VEGFR-II, GD2, FR-α, ErbB2, EpCAM, EGFRvIII, B7-H3, or EGFR. In embodiments, the solid tumor antigen is or comprises tumor associated MUC1 (tMUC1), TSHR, GUCY2C, ACPP, CLDN18.2 (18.2), PSMA, or UPK2.

[0286] In embodiments, the CAR comprises the antigen binding domain, a transmembrane domain, a co-stimulatory domain, and a CD3 zeta domain. In embodiments, the co-stimulatory domain comprises the intracellular domain of CD27, CD28, 4-1BB, OX40, CD30, CD40, PD-1, ICOS, lymphocyte function-associated antigen-1 (LFA-1), CD2, CD7, LIGHT, NKG2C, B7-H3, a ligand that specifically binds with CD83, or a combination thereof. In embodiments, the second CAR includes a binding domain that binds tMUC1 and a co-stimulatory domain that includes an intracellular domain of CD28; and/or the first CAR includes a binding domain that binds CD19 and a co-stimulatory domain that includes an intracellular domain of 4-1BB.

[0287] In embodiments, the first population of cells and/or the second population of cells further comprise a dominant negative form of a checkpoint protein or of the checkpoint protein's receptor present on T cells (e.g., PD-1). In embodiments, the first population of cells comprise a vector comprising a nucleic acid encoding the first CAR and the dominant negative form of PD-1.

[0288] In embodiments, the second CAR comprises a scFv binding tMUC1, an intracellular domain of 4-1BB or CD28, CD3 zeta domain, and the second CAR comprises a scFv binding CD19, an intracellular domain of 4-1BB or CD28, CD3 zeta domain. In embodiments, the first CAR comprises a scFv, which is SEQ ID NO: 5, and the second CAR comprise a scFv, which is the SEQ ID NO: 70. Corresponding sequences are listed in Table 5.

[0289] Embodiments relate to a method comprising administering an effective amount of the second population of T cells comprising a second CAR comprising a scFv binding tMUC1 to a patient having cancer. The second CAR may further comprise an intracellular domain of 4-1BB or CD28, CD3 zeta domain. In embodiments, the method further comprises administering an effective amount of the first population of T cells comprising a first CAR comprising a scFv binding CD19 to the patient, thereby enhancing expansion of the second population of T cells in the patient. The CAR may further comprise an intracellular domain of 4-1BB or CD28, and CD3 zeta domain.

[0290] In embodiments, the second CAR comprises the intracellular domain of CD28, and the first CAR comprises the intracellular domain of 4-1BB. In this instance, the first population of T cells comprising CD19 may cause less adverse effect on the patient (e.g., CRS), and/or the second population of T cells comprising tMUC1 may cause enhanced T cell response (e.g., killing) as compared to those of the second CAR comprising the intracellular domain of 4-1BB and/or the first CAR comprising the intracellular domain of CD28. In embodiments, the second CAR comprises the intracellular domain of CD28 such that the second population of T cells may cause enhanced T cell response (e.g., killing) as compared to that of the second CAR comprising the intracellular domain of 4-1BB. In embodiments, the first CAR comprises the intracellular domain of 4-1BB such that the first population of T cells may cause less adverse effect on the patient (e.g., CRS) as compared to that of the first CAR comprising the intracellular domain of CD28.

[0291] In embodiments, the second population of cells comprises the scFv binding a solid tumor antigen but do not comprise the scFv binding a B cell antigen, and the first population of cells comprises the scFV binding an antigen different from the solid tumor antigen (e.g., a WBC antigen or a B cell antigen) but do not comprise the scFV binding the tumor antigen. In these instances, the T cell response of the patient induced by binding between the first population of T cells and the antigen (e.g., CD19) may cause both the first and second populations of T cells to expand. Accordingly, the patient may be administered with a mixed population of genetically engineered T cells consisting essentially of the first population of cells and the second population of cells. In embodiments, the patient may be administered with the second population of genetically engineered T cells and one or more recombinant proteins (e.g., cytokine such as IL6 and/or INFγ) or cells expressing and secretion of the one or more recombinant proteins, which may induce similar or enhanced T cell response caused by the first population of T cells. In embodiments, the patient may be administered with the second population of T cells and a hormone drug (e.g., fulvestrant), which may induce similar or enhanced T cell response caused by the first population of T cells.

[0292] In embodiments, the first population of modified cells can further comprise a third CAR comprising the scFv binding tMUC1, the intracellular domain of 4-1BB or CD28, and the CD3 zeta domain. In embodiments, the second population of cells does not comprise the scFv binding CD19. In embodiments, the first population of cells does not comprise the scFv binding tMUC1.

[0293] In embodiments, the methods described herein of enhancing cell expansion and/or cell response in a subject are compared to methods in which the subject is administered with only one CAR (for example, only the first CAR or only the second CAR) and/or the subject is not administered with a mixed population of cells described herein. In embodiments, the mixed population of cells described herein enhances the expansion of the cells and/or the cell response.

[0294] Embodiments relate to a composition and a method for treating a subject having cancer or enhancing T cell response of the subject. The method includes administering to the subject an effective amount of a population of modified cells having a first CAR. The first CAR includes an antigen binding domain, a transmembrane domain, a co-stimulatory domain of CD28, and/or a CD3 zeta domain. The method can further include monitoring and/or measuring one or more parameters of T cell response induced by the modified cells. For example, the one or more parameters include cytokine release, lymphocyte numbers, and a level of CAR T cell expansion and exhaustion. The method can further include administering an effective amount of a population of modified cells including a second CAR to the subject in response to a predetermined time (e.g., one or two weeks after the infusion) and/or condition, which may be associated with the measured parameters (e.g., a copy number of CAR and numbers of CAR T cells). The second CAR includes an antigen binding domain, a transmembrane domain, a co-stimulatory domain of 4-1BB, and/or a CD3 zeta domain. It has been reported that CD28 CAR T cells and 4-1BB CAR T cells behave differently in the lab and in the clinic. Accordingly, the method combines the advantages of the two co-stimulatory domains by coupling the strong initial immune response with the long and persistent immune response. For example, the first CAR including CD28 elicits a robust T cell activation and is associated with effector-like differentiation. While the first CAR can cause T cell exhaustion, it is designed to induce a strong initial response of the subject's immune system. The second CAR including the 4-1BB reduces T cell exhaustion, enhance persistence, and increases central memory differentiation and mitochondrial biogenesis, which are designed for persistent CAR T therapy. In embodiments, the initial response induced by the first CAR can enhance the persistent CAR T therapy. In embodiments, the population of modified cells including the first CAR and the population of modified cells including the second CAR may be administered to the subject at the same time. For example, the composition may include the population of modified cells including the first CAR and the population of modified cells including the second CAR. In embodiments, the first CAR binds an antigen of WBC, and the second CAR binds a solid tumor antigen. In embodiments, the first CAR and the second CAR bind the same or different solid tumor antigens. For example, a population of modified cells including a CAR that binds a solid tumor antigen (e.g., TSHR) and includes 4-1BB co-stimulatory domain and a population of modified cells including a CAR that binds the solid tumor antigen (e.g., TSHR) or another solid tumor antigen (e.g., tMuc1) and includes CD28 co-stimulatory domain were mixed together to obtained a mixed modified cells. In embodiments, the modified cells may be further administered to the subject. In embodiments, the modified cells may be further administered to the subject along with a population of modified cells including a CAR binding a WBC antigen (e.g., CD19).

[0295] In embodiments, the CAR molecules described herein comprise one or more complementarity-determining regions (CDRs) for binding an antigen of interest. CDRs are part of the variable domains in immunoglobulins and T cell receptors for binding a specific antigen. There are three CDRs for each variable domain. Since there is a variable heavy domain and a variable light domain, there are six CDRs for binding an antigen. Further since an antibody has two heavy chains and two light chains, an antibody has twelve CDRs altogether for binding antigens. In embodiments, the CAR molecules described herein comprise one or more CDRs for binding antigens. In embodiments, the one or more CDRs bind the antigen of a WBC, such as a B cell. As an example, the one or more CDRs bind CD19, the cell surface antigen of a B cell. In embodiments, the one or more CDRs bind a tumor antigen, for example, tMUC1. TSHR, GUCY2C, ACPP, CLDN18.2 (18.2), PSMA, or UPK2.

[0296] Embodiments relate to an immunotherapeutic system and its use for treating cancer of a subject. As shown in FIG. 61, the immunotherapeutic system 102 includes function component 104 configured to inhibit growth of tumor cells, coupling component 106 configured to couple the subject's immune response with the inhibition of the growth of tumor cells, and controlling component 108 configured to control the inhibition and/or coupling. In embodiments, the immunotherapeutic system 102 is a composition comprising one or more pharmaceutical compositions (e.g. antibodies and cells) suitable for treating cancer.

[0297] Examples of function component 104 include CAR T, TIL, and TCR and other cellular therapies, an oncolytic virus therapy, a chemotherapy, a tumor vaccine therapy, a metabolism target therapy, and targeted therapy. In embodiments, function component 104 includes at least one of the inhibitors that regulate immune metabolism (e.g., IDO inhibitors and adenosine inhibitors); the immunomodulators (e.g., IMiDs); the agonists against monocytes or dendritic cells (e.g., TLRs/STING); an oncolytic virus therapy; the tumor vaccines (e.g., DC vaccines); the tumor infiltrating T cells (e.g., Tils); the macrophage-reprogramming agents (e.g., CCR2-CCL2 inhibitor, CSF-1Rs inhibitor, PPAR-gamma agonist/inhibitor and CD-40 agonist); the chemotherapy drugs (e.g., cyclophosphamide, fludarabine and ibrutinib); the monoclonal antibody targeting drugs (e.g., anti-her2); or the targeted drugs for non-monoclonal antibodies (e.g., ALK inhibitors, EGF/VEGF inhibitors). Example targets of TCR therapy are listed in Table 6. In embodiments, function component 104 can be implemented by a Bite molecule (e.g., TSHR-CD3). In embodiment, a Bite molecule comprises a first and a second binding domain, wherein the first binding domain binds to a solid tumor antigen, and the second binding domain binds, for example, the T cell CD3 receptor complex or CD28, as illustrated in FIG. 77A. The second binding domain can also bind other T cell molecules such as 4-1BB, OX40, GTTR, ICOS, NKG20, etc.

[0298] Examples of coupling component 106 include immune response elicited by CAR T/NK cells, DC stimulation, T cell stimulation, and antigen/vaccine stimulation. The CAR T/NK cells include the modified cells described in the present disclosure. For example, the modified cell includes a CAR binding an antigen of WBC (e.g., CD19), an antigen of EBV, and/or albumin. T cell stimulation may be implemented by a Bite molecule (e.g., CD19-CD3). DC cell stimulation may be implemented by administering CAR T/NK cells to the subject, or administering a small molecule, small peptide, vaccine, or antigen to lymphoid organs (e.g., lymph node) of the subject. In embodiment, a Bite molecule may comprise a first and a second binding domain, wherein the first binding domain binds to an antigen, and the second binding domain binds, for example, the T cell CD3 receptor complex or CD28, as illustrated in FIG. 77A. The second binding domain can bind other T cell molecules such as 4-1BB, OX40, GITR, ICOS, NKG20, etc. The antigen may bind a WBC antigen (e.g., CD19 and BCMA). In embodiments, CAR T cells may express the Bite molecule. In embodiments, CAR T cells and the Bite molecule may be administered to the subject at same time or separately.

[0299] In embodiments, the immunotherapeutic system 102 can comprise various Bite antibodies to treat cancer. In embodiments, the immunotherapeutic system 102 comprises a first Bite molecule and a second Bite molecule. The first Bite molecule can comprise a first and a second binding domain, wherein the first binding domain binds to a solid tumor antigen, and the second binding domain binds, for example, the T cell CD3 receptor complex or CD28. The second Bite molecule can comprise a third and a fourth binding domain, wherein the third binding domain binds to an antigen, and the fourth binding domain binds, for example, the T cell CD3 receptor complex or CD28. In embodiments, the immunotherapeutic system 102 comprises modified bispecific antibodies or trispecific antibody (e.g., FIGS. 87C and 87D) as well as the first Bite and/or the second Bite antibodies. In these instances, antibody techniques can be used to stimulate cells to secrete one or more cytokines (e.g., IL-6, IL-12, IL-15, IL-7, and IFNγ) in or close to tumor microenvironment. Component 8702 can be implemented to function as a stimulator that stimulate various cells to enhance cytokine releases. For example, the stimulator can comprise agonists or ligands directly or indirectly cause a subject to secrete one or more cytokines (e.g., IL-6, IL-12, IL-7, IL-15, and IFNγ). In embodiments, uses of the first and/or the second Bite molecules can be combined with the administration of human recombinant forms of the one or more cytokines. In embodiments, the therapeutic agent can be isolated, synthetic, native, or recombinant human cytokines. In embodiments, administering an effective amount of the human recombinant cytokine comprises intravenous delivery of an amount of IL-6 in the range of about 0.5-50 ug per kilogram of body weight. In embodiments, the human recombinant cytokine comprises IL-6 or IL-7. Recombinant IL-15 can be administered as a daily bolus infusion for a predetermined time or days at 3 mcg/kg/day and 1 mcg/kg/day. Recombinant IFNγ can be administered at a dose of 2 million units daily for 5 days per week over a predetermined time. In embodiments, administering the effective amount of the human recombinant cytokine comprises administering an effective amount of the human recombinant cytokine such that concentrations of the cytokines, such as IL-6 and/or IFN-γ, in the blood of the subject can increase 5-1000 times (e.g., 50 times). Methods of administering IL-6, IL-15, and/or IFNγ can be found in U.S. Pat. No. 5,178,856A and Cytokines in the Treatment of Cancer, Volume 00, Number 00, 2018 of Journal of Interferon & Cytokine Research, which are incorporated herein by reference in their entirety. In embodiments, recombinant IL-12 can be administered at 30 ng/kg as a starting dose and escalated to 500 ng/kg twice weekly after the infusion of CAR T cells. Methods of administering of IL-12 can be found in Leuk Res. 2009 November; 33(11): 1485-1489, which is incorporated here by reference. In embodiments, the human recombinant cytokine can be administered to the subject starting from day 0, 1, 2, 3, 4, 5, 6, 7, 8, 9, 10, 11, 12, 13, 14, 15, 16, 17, 18, 19, 20, 21, 22, 23, 24, 25, 26, 27, 28, 29, or 30 days after administration.

[0300] In embodiments, the coupling component 106 and the function component 104 may combined and implemented using lentiviral vectors encoding the CAR binding a solid tumor antigen and a superantigen that result in excessive activation of the immune system of the subject. For example, the population of modified cells comprise a lentiviral vector encoding the CAR and a superantigen, the superantigen is Aravan virus Nucleoprotein, Australian bat lyssavirus Nucleoprotein, Duvenhage virus Nucleoprotein, European bat lyssavirus 1 Nucleoprotein, Irkut virus Nucleoprotein, Khujand virus Nucleoprotein, Maize mosaic virus Nucleoprotein, Mokola virus Nucleoprotein, Mouse mammary tumor virus Protein PR73, Rabies virus Nucleoprotein, Rice yellow stunt virus Nucleoprotein, Staphylococcus aureus Enterotoxin, Taro vein chlorosis virus Nucleoprotein or West Caucasian bat virus Nucleoprotein. The nucleoproteins may be modified with addition of an extracellular signal peptide. In embodiments, CAR T cells may be combined with bispecific or trispecific antibodies to treat tumors. The CAR T cells may bind a solid tumor antigen. In embodiments, CAR T cells and the antibodies may be administered to the subject at same time or separately. In embodiments, CAR T cells may express the antibodies. The bispecific antibody may comprise a first antibody fragment targeting CD3, CD28, 41-BB, GITR, OX40, etc. and a second antibody fragment targeting a solid tumor antigen or a WBC antigen. The trispecific antibody may comprise a first antibody fragment targeting, for example, CD3, TLR, FcR or NKG2D, a second antibody fragment targeting, for example, CD28, 41-BB, GITR, or OX40, and a third antibody fragment targeting, for example, a WBC antigen or a solid tumor antigen, as illustrated in FIG. 77B.

[0301] The present disclosure also describes a population of modified cells comprising a polynucleotide encoding a CAR and the bispecific antibody or the trispecific antibody described above. The present disclosure also describes a population of modified cell expressing a CAR and the bispecific antibody or the trispecific antibody described above.

[0302] As shown in FIG. 65, there are three ways to activate dendritic cells (DCs). The first way is to deliver the antigen (e.g., CEA, PSA or TERT) to the DCs. For example, cancer vaccine or Nanoparticles comprising the antigen can activate DCs which in turn can activate the immune system. The second way is by delivering an agonist (e.g., cytokines) to accelerate the DCs' maturation and release related cytokines directly or indirectly. The third way is to deliver cytokines or proteins that helps the activation of DCs. Other methods can also be implemented to activate DCs. For example, DC may be stimulated by various methods such as LPS, various viruses, Plasmodium antigen, cytokines, and vaccine. In embodiments, a small molecule (e.g., CpG oligonucleotides and imiquimod, prototypic drugs) can be associated with an albumin to be delivered to a lymph node to stimulate DCs, which can then selectively cause expansion of CAR T cells homing to the lymph node. The Examples of the present disclosure show that some T cells (e.g., central memory T cells) do not stably remain in the blood after infusions but enter lymphoid organs such as lymph nodes due to molecules such as CCR7 and CD62L on the T cells. Thus, direct and/or indirect stimulation of DCs can selectively expand and/or activate CAR T cells showing more memory-like phenotypes, thus, enhancing efficacy of T therapy. More information about the implementation can be found in Ma et al., Science 365, 162-168 (2019), which is incorporated by reference.

[0303] Antigen/vaccine stimulation may be implemented by the following embodiments. As an example, the method comprises: administering an effective amount of T cells (e.g., TILs, CAR T, TCR cells) to a subject in need thereof to treat tumor (e.g., solid tumor), and administering an effective amount of an agent that directly or indirectly activates the T cells. In embodiments, the agent includes an antigen that the T cells recognize. In embodiments, the agent includes presenting cells expressing a soluble agent that the extracellular domain of the CAR recognizes. In embodiments, the agent includes vaccines derived from the antigen. For example, the agent includes the antigen associated with albumin such that the agent activates the T cells in, for example, the lymph nodes and then activate DCs, eliciting expansion of the T cells.

[0304] Examples of controlling component 108 include a suicide system (e.g., suicide gene), conditional gene expression system (e.g., lac, tetracycline, or galactose systems), and gene modulation system (e.g., Hif1a, NFAT, FOXP3, and/or NFkB).

[0305] FIG. 62 shows an immunotherapeutic system, for example immunotherapeutic system 102. In embodiments, the population of modified cells comprises two types of cells: function component cells and coupling component cells. The function component cells are capable of inhibiting tumor cells. In embodiments, the function components cells include a binding molecule binding a tumor antigen (e.g., a solid tumor antigen). For example, the binding molecule is or includes a CAR or a TCR that binds a solid tumor. In embodiments, the coupling component cells include a CAR targeting a white blood cell antigen. In embodiments, the coupling component cells include modified cells including a nucleic acid sequence encoding IL12 linked to a HIF VHL binding domain, and/or modified cells including a nucleic acid sequence encoding IL6 and IFNγ linked by a 2A peptide.

[0306] FIG. 62 shows a schematic overview of an example process for the combination of CAR T cells and tumor-infiltrating lymphocytes (TIL). PBMCs of a subject can be obtained and CAR T targeting an antigen of WBC (e.g., CD19) can be prepared using various methods described in the present disclosure. In embodiments, the CAR T cells can be Coupling Component cells described in FIG. 61. The subject can then be lymphodepleted. TILs can be prepared using various methods. An example of the methods is the preparation of TIL 102. For example, after excision, the tumor metastasis is digested into a single cell suspension in 24 well plates. These suspensions/fragments are then cultured in the presence of IL-2. In embodiments, the cultures are tested for recognition of autologous melanoma cells (for example, melanoma cell lines or freshly frozen tumor digest, and if not available a panel of HLA-matched allogeneic tumor cell lines), by measuring IFNγ secreted in the medium using an IFNγ ELISA. In embodiments, the selection step for tumor reactivity can be omitted. TIL cultures are then expanded to treatment levels by stimulation with soluble anti-CD3 monoclonal antibody and high concentration of IL-2, and irradiated allogeneic feeder cells. After the TIL cultures are purified to obtain the product cells, the product cells are ready to be infused with CAR T cells that enhance TIL expansion in the subject. Information on TILs preparations may be found in International Application NOs: WO2018/081473 and WO201S/094167 and Molecular Oncology, Volume 9, Issue 10, December 2015, Pages 1918-1935, which are incorporated herein by reference.

[0307] There are three theoretical problems that need to be resolved for T cells to overcome solid tumors. The first problem is the identification of the T cells that recognize the tumor. Instead of identifying only one target, it is necessary to identify as many heterogeneous cancer cells as possible. In this regard, TIL (Tumor Infiltrating T Lymphocyte) Therapy seems promising. The second challenge is to allow these screened T cells that recognize tumors to overcome the suppression of the tumor microenvironment. The third challenge is to allow these screened population of T cells that recognize tumors and overcome the microenvironmental inhibition and expand sufficiently to fight advanced tumors and reverse the course of the disease. Ordinary TIL technology is amplified in large quantities in vitro, but at a high cost and long cycles. Excessive costs can lead to high drug prices in the future, and too long a cycle can make advanced cancer patients unable to afford, which will challenge future applications of the product to treatment. Accordingly, Immunotherapeutic system 102 can be helpful for the latter two challenges. Coupling component 106 can couple a subject's immune response with TIL therapy, for example, to expand TILs in the subject, reducing the cost and shortening the cycle associated with the TIL therapy and/or overcoming the suppression of the tumor microenvironment by maintaining the population of TILs in the subject.

[0308] The present disclosure describes a composition for treating blood cancer (e.g., leukemia, melanoma, and lymphoma). Example of blood cancers include Chronic lymphocytic leukemia (CLL) and Non-Hodgkin lymphoma (NHL). The composition comprises mixed population of modified cells comprising at least two groups of modified cells, each having a polynucleotide encoding a CAR binding a blood cancer antigen (e.g., CD19, CD20, and BCMA). One group of the mixed population of modified cells further comprises a polynucleotide encoding one or more recombinant proteins (e.g., IL-6, IL-12, IL-7, IL-15, and IFNγ). For example, the mixed population of modified cells comprises a first group of modified cells comprising a polynucleotide encoding CD19 CAR (e.g., FIG. 87A) and at least one of a second group of modified cells comprising a polynucleotide encoding CD19 CAR and IL-6, a third group of modified cells comprising a polynucleotide encoding CD19 CAR and IL-12, and a fourth group of modified cells comprising a polynucleotide encoding CD19 CAR and IFNγ (e.g., FIG. 87B). These groups of modified cells can be mixed to obtain the mixed population of modified cells, which are administered to a subject having B cell leukemia and lymphoma. In embodiments, the mixed population of modified cells can be mixed based on a predetermined ratio to obtain the mixed population of modified cells. The predetermined ratio is used to control the amount of expression of the one or more cytokines in the subject to achieve controllable, lasting, and efficient cytokine effects in the subject while experiencing less cytotoxic effects. In embodiments, the predetermined ratio for the first, the second, the third, and the fourth groups of modified cells is set such that there are more of the first group of modified cells than the second, third, or fourth group of modified cells in the mixed population of modified cells. For example, the predetermined ratio of the first group of modified cells and the second, the third, or the fourth group of modified cells is 10:1. In embodiments, the predetermined ratio is 1:1, 10:1, 100:1, 1000:1, and 104:1, as well as individual numbers within that range, for example, 10:1, 100:1, or 1000:1. In embodiments, the second predetermined ratio is between 10:1 and 1000:1. In embodiments, the second predetermined ratio is between 10:1 and 1:100. In embodiments, the second predetermined ratio is between 1:1 and 100:1.

[0309] The present disclosure describes a composition for treating solid tumor. The composition comprises two populations of modified cells. The first population of modified cells comprises two or more groups of modified cells. One group of modified cells comprises a polynucleotide encoding the first CAR (e.g., CD19, CD22, BCMA CARs) and at least one other group of modified cells comprises a polynucleotide encoding one or more cytokines (e.g., IL-6, IL12, and IFN) or encoding the one or more cytokines and the first CAR. In embodiments, the first CAR binds a WBC antigen. For example, the first population of modified cells comprises a first group of modified cells comprising a polynucleotide encoding CD19 CAR (e.g., FIG. 87A) and a second group of modified cells comprising a polynucleotide encoding CD19 CAR and a cytokine (e.g., Embodiment 2 of FIG. 87). The first and second groups of modified cells are mixed to obtain the first population of modified cells. In embodiments, the first and second groups of modified cells are mixed based on a third predetermined ratio such that there are more of the first group of modified cells than the second group of modified cells in the first population of modified cells. For example, the third predetermined ratio of the first group of cells to the second group of modified cells is 10:1. In embodiments, the second population of modified cells comprises a CAR binding a solid tumor antigen. In embodiments, the second population of modified cell does not express the one or more cytokines. The first population and the second population of modified cells can be mixed to obtain the mixed population of modified cells, which are infused in the subject. In embodiments, the first population and the second population of modified cells can be mixed based on a fourth predetermined ratio such that there are more of the second population of modified cells than the first population of modified cells. For example, the second predetermined ratio of the first population and the second population of modified cells is less than 1:1 but more than 1:10,000. In embodiments, the fourth predetermined ratio is 1:1, 1:10, 1:100, 1:1000, and 1:104, as well as individual numbers within that range, preferably 1:10, 1:100, or 1:1000. In embodiments, the fourth predetermined ratio is between 1:10 and 1:1000. In embodiments, the second predetermined ratio is between 1:10 and 1:100. In embodiments, the second predetermined ratio is between 1:1 and 1:100. The predetermined ratio is used to control the amount of expression of the one or more cytokines in the subject to achieve controllable, lasting, and efficient cytokine effects in the subject while having less cytotoxicity.

[0310] The present disclosure is further described by reference to the following exemplary embodiments and examples. These exemplary embodiments and examples are provided for purposes of illustration only and are not intended to be limiting unless otherwise specified. Thus, the present disclosure should in no way be construed as being limited to the following exemplary embodiments and examples, but rather, should be construed to encompass any and all variations which become evident as a result of the teaching provided herein.

### EXEMPLARY EMBODIMENTS

[0311] The following are exemplary embodiments:

1. A population of modified cells effective for expanding and/or maintaining the modified cells in a patient, wherein the population of modified cells comprise at least two different modified cells: a first modified cell comprising an antigen binding domain for expanding and/or maintaining the modified cells; and a second modified cell comprising an antigen binding domain for killing a target cell, such as a tumor cell. In embodiments, the modified cells are modified T cells. In embodiments, the at least two different modified cells include two different modified T cells, two different modified immune cells, or a combination thereof. In embodiments, the modified immune cells include modified T cells, DC cells, and/or macrophages.
2. The population of modified cells of embodiment 1, wherein the antigen binding domains bind different antigens.
3. The population of modified cells of embodiment 1, wherein the population of modified cells further comprises a third modified cell expressing at least two different antigen binding domains, a first antigen binding domain for expanding and/or maintaining the modified cells and a second antigen binding domain for killing a target cell, and wherein the two different antigen binding domains are expressed on the same cell.
4. The population of modified cells of embodiment 1, wherein the population of modified cells comprises a modified cell expressing an antigen binding domain for killing a target cell and a modified cell expressing at least two antigen binding domains, a first antigen binding domain for expanding and/or maintaining the modified cells and a second antigen binding domain for killing a target cell, and wherein the two different antigen binding domains are expressed on the same modified cell.
5. The population of modified cells of embodiment 1, wherein the population of modified cells includes a modified cell expressing an antigen binding domain for expanding and/or maintaining the modified cells and a modified cell expressing at least two antigen binding domains, a first antigen binding domain for expanding and/or maintaining the modified cells and a second antigen binding domain for killing a target cell, and wherein the two different antigen binding domains are expressed on the same modified cell.
6. The population of modified cells of any one of embodiments 1-5, wherein the modified cell is a modified T cell, a modified NK cell, a modified macrophage, or a modified dendritic cell.
7. The population of modified cells of any one of embodiments 1-6, wherein the antigen binding domain for expanding/or and maintaining the modified cells bind the surface antigen of a WBC, and the antigen binding domain for killing a target cell binds a tumor antigen.
8. The population of modified cells of embodiment 7, wherein the WBC is a B cell.
9. The population of modified cells of embodiment 7, wherein the cell surface antigen of the WBC is CD19, CD22, CD20, BCMA, CD5, CD7, CD2, CD16, CD56, CD30, CD14, CD68, CD11b, CD18, CD169, CD1c, CD33, CD38, CD138, or CD13.
10. The population of modified cells of any one of embodiments 1-9, wherein the solid tumor antigen is tMUC1, PRLR, CLCA1, MUC12, GUCY2C, GPR35, CR1L, MUC 17, TMPRSS11B, MUC21, TMPRSS11E, CD207, SLC30A8, CFC1, SLC12A3, SSTR1, GPR27, FZD10, TSHR, SIGLEC15, SLC6A3, KISS1R, QRFPR, GPR119, CLDN6, UPK2, ADAM12, SLC45A3, ACPP, MUC21, MUC16, MS4A12, ALPP, CEA, EphA2, FAP, GPC3, IL13-Rα2, Mesothelin, PSMA, ROR1, VEGFR-II, GD2, FR-α, ErbB2, EpCAM, EGFRvIII, B7-H3, EGFR, or one of those listed in Table 1.
11. The population of modified cells of embodiment 7, wherein the cell surface antigen of the WBC is CD19, CD20, CD22, or BCMA.
12. The population of modified cells of embodiment 7, wherein the cell surface antigen of a B cell is CD19, and the tumor antigen is tMUC1, TSHR, GUCY2C, ACPP, CLDN18.2 (18.2), PSMA, or UPK2.
13. A composition comprising a first population of cells comprising a first CAR binding a first antigen and a second population of cells comprising a second CAR binding a second antigen, wherein the second antigen is a tumor antigen and the first antigen and second antigen are different antigens.
14. The composition of embodiment 13, wherein the first population of cells does not comprise the second CAR, and/or the second population of cells does not comprise the first CAR.
15. The composition of embodiment 14, wherein the composition further comprises a third population of cells comprising the first CAR and the second CAR.
16. The composition of embodiment 13, wherein the second population of cells further comprises the first CAR, and the first population of cells do not comprise the second CAR; or the first population of cells further comprises the second CAR.
17. The composition of embodiment 13, wherein second population of cells does not comprise the first CAR, and the first population of cells comprise the second CAR.
18. A method of enhancing expansion of the second population of cells, wherein the second population of cells are cells targeting a solid tumor, the method comprising administering an effective amount of the composition of any one of embodiments 13-17 to a subject having a form of cancer associated with or expressing the tumor antigen.
19. A method of enhancing T cell response in a subject or treating a subject having cancer, the method comprising administering an effective amount of the composition of any one of embodiments 13-17 to the subject having a form of cancer associated with or expressing the tumor antigen.
20. A method of enhancing expansion of cells in a subject, the method comprising: contacting cells with a first vector comprising a first nucleic acid sequence encoding a first CAR and a second vector comprising a second nucleic acid sequence encoding a second CAR to obtain the composition of any one of embodiments 13-17; and administering an effective amount of the composition to the subject having a form of cancer associated with or expresses the tumor antigen.
21. A method of enhancing T cell response in a subject in need thereof or treating a subject having cancer, the method comprising: contacting cells with a first vector comprising a first nucleic acid sequence encoding a first CAR and a second vector comprising a second nucleic acid sequence encoding a second CAR to obtain the composition of any one of embodiments 13-17; and administering an effective amount of the composition to the subject having a form of cancer associated with or expressing the tumor antigen.
22. A method of enhancing expansion of cells in a subject, the method comprising: administering an effective amount of the first population of cells of the composition of any one of embodiments 13-17; and administering an effective amount of the second population of cells.
23. The method of any one of embodiments 20-22, wherein the first vector and the second vector comprise lentiviral vectors.
24. The composition or the method of any one of embodiments 13-23, wherein the first or second antigen is or comprises a surface molecule of a white blood cell (WBC), a tumor antigen, or a solid tumor antigen.
25. The composition or the method of any one of embodiments 13-24, wherein the cells are modified T cells, modified NK cells, modified macrophages, or modified dendritic cells.
26. The composition or the method of embodiment 24, wherein the WBC is a granulocyte, a monocyte, or a lymphocyte.
27. The composition or the method of embodiment 26, wherein the WBC is a B cell.
28. The composition or the method of embodiment 27, wherein the cell surface molecule of the WBC is CD19, CD22, CD20, BCMA, CD5, CD7, CD2, CD16, CD56, CD30, CD14, CD68, CD11b, CD18, CD169, CD1c, CD33, CD38, CD138, or CD13.
29. The composition or the method of embodiment 26, wherein the cell surface molecule of the WBC is CD19, CD20, CD22, or BCMA.
30. The composition or the method of embodiment 26, wherein the cell surface molecule of the WBC is CD19.
31. The composition or the method of embodiment 26, wherein the tumor antigen is a solid tumor antigen.
32. The composition or the method of embodiment 26, wherein the solid tumor antigen is tMUC1, PRLR, CLCA1, MUC12, GUCY2C, GPR35, CR1L, MUC 17, TMPRSS11B, MUC21, TMPRSS11E, CD207, SLC30A8, CFC1, SLC12A3, SSTR1, GPR27, FZD10, TSHR, SIGLEC15, SLCBA3, KISS1R, QRFPR, GPR119, CLDN6, UPK2, ADAM12, SLC45A3, ACPP, MUC21, MUC16, MS4A12, ALPP, CEA, EphA2, FAP, GPC3, IL13-Rα2, Mesothelin, PSMA, ROR1, VEGFR-II, GD2, FR-α, ErbB2, EpCAM, EGFRvIII, B7-H3, CLDN18.2, or EGFR.
33. The composition or the method of embodiment 26, wherein the solid tumor antigen is or comprises tMUC1.
34. The composition or the method of any one of embodiments 13-33, wherein the CAR comprises the antigen binding domain, a transmembrane domain, a co-stimulatory domain, and a CD3 zeta domain.
35. The composition or the method of embodiment 34, wherein the co-stimulatory domain comprises the intracellular domain of CD27, CD28, 4-1BB, OX40, CD30, CD40, PD-1, ICOS, lymphocyte function-associated antigen-1 (LFA-1), CD2, CD7, LIGHT, NKG2C, B7-H3, a ligand that specifically binds with CD83, or a combination thereof.
36. The composition or the method of embodiment 34, wherein the co-stimulatory domain of the second CAR comprises or is an intracellular domain of 4-1BB, and the antigen binding domain of the second CAR binds tMUC1; and/or the antigen binding domain of the first CAR binds CD19 and the co-stimulatory domain of the second CAR comprises or is an intracellular domain of CD28.
37. The composition or the method of any one of embodiments 13-36, wherein the first population of cells and/or the second population of cells further comprise a dominant negative form of PD-1.
38. The composition or the method of embodiment 37, wherein the first population of cells comprise a vector encoding the first CAR and the dominant negative form of PD-1.
39. The composition or the method of any one of embodiments 13-38, wherein the first CAR comprises a scFv binding tMUC1, an intracellular domain of 4-1BB or CD28, and a CD3 zeta domain, and the second CAR comprises a scFv binding CD19, an intracellular domain of 4-1BB or CD28, and a CD3 zeta domain.
40. The composition or the method of any one of embodiments 13-39, wherein the first CAR comprises SEQ ID NO: 5, and the second CAR comprise SEQ ID NO: 70.
41. The composition or the method of any one of embodiments 13-40, wherein the second population of cells comprises a lentiviral vector encoding the first CAR and a therapeutic agent and the first population of cells comprises a lentiviral vector encoding the second CAR and a dominant negative form of PD-1.
42. The composition or the method of any one of embodiments 13-41, wherein the first population of cells comprise the first CAR and a therapeutic agent and the second population of cells comprise the second CAR and a dominant negative form of PD-1.
43. The composition or the method of embodiment 41 or 42, wherein the therapeutic agent comprises or is a cytokine.
44. The composition or the method of embodiment 43, wherein the cytokine is IL6 and/or INFγ.
45. A method comprising administering an effective amount of a first population of T cells comprising a CAR comprising a scFv binding CD19, an intracellular domain of 4-1BB or CD28, and a CD3 zeta domain to a subject, thereby enhancing expansion of the first population of T cells in the subject; and administering an effective amount of a second population of T cells comprising a CAR comprising a scFv binding tMUC1, an intracellular domain of 4-1BB or CD28, and a CD3 zeta domain to the patient.
46. The method of embodiment 45, wherein first population of cells further comprises an additional CAR comprising the scFv binding tMUC1, the intracellular domain of 4-1BB or CD28, and the CD3 zeta domain.
47. The method of embodiment 45, wherein the second population of cells does not comprise the scFv binding CD19.
48. The method of embodiment 45, wherein the first population of cells does not comprise the scFv binding tMUC1.
49. A method for enhancing treatment of a subject with cancer, the method comprising: administering to the subject with CAR T cells targeting an antigen of WBC; and administering to the subject tumor infiltrating lymphocytes (TILs).
50. A method for expanding TILs in a subject with cancer, the method comprising: administering to the subject with CAR T cells targeting an antigen of WBC; and administering to the subject tumor infiltrating lymphocytes (TILs).
51. The method of embodiment 49 or 50, wherein the TILs are prepared by:
(i) obtaining a first population of TILs from a tumor resected from the subject;
(ii) performing a first expansion by culturing the first population of TILs in a cell culture medium comprising IL-2 to produce a second population of TILs;
(iii) performing a second expansion by supplementing the cell culture medium of the second population of TILs with additional IL-2, OKT-3, and antigen presenting cells (APCs), to produce a third population of TILs, wherein the third population of TILs is at least 100-fold greater in number than the second population of TILs, and wherein the second expansion is performed for at least 14 days in order to obtain the third population of TILs, wherein the third population of TILs is a therapeutic population of TILs which comprises an increased subpopulation of effector T cells and/or central memory T cells relative to the second population of TILs; and
(iv) administering a therapeutically effective dosage of the third population of TILs to the subject.
52. The method of embodiment 51, wherein the method further comprises prior to step (iv) a step of performing an additional second expansion by supplementing the cell culture medium of the third population of TILs with additional IL-2, additional OKT-3, and additional APCs, wherein the additional second expansion is performed for at least 14 days to obtain a larger therapeutic population of TILs than obtained in step (iii), wherein the larger therapeutic population of TILs comprises an increased subpopulation of effector T cells and/or central memory T cells relative to the third population of TILs.
53. The method of embodiment 51, wherein after step (ii) the cells are removed from the cell culture medium and cryopreserved in a storage medium prior to the second expansion of embodiment 51.
54. The method of embodiment 53, wherein the cells are thawed prior to the second expansion of embodiment 51.
55. The method of embodiment 51, wherein step (iii) is repeated one to four times in order to obtain sufficient TILs in the therapeutic population of TILs for a therapeutically effective dosage of the TILs.
56. The method of any one of embodiments 49 to 55, wherein the APCs are peripheral blood mononuclear cells (PBMCs).
57. The method of any one of embodiments 49 to 55, wherein the effector T cells and/or central memory T cells exhibit one or more characteristics selected from the group consisting of expression of CD27, expression of CD28, longer telomeres, increased CD57 expression, and decreased CD56 expression, relative to effector T cells and/or central memory T cells in the third population of cells.
58. The method of any one of embodiments 49 to 55, wherein the effector T cells and/or central memory T cells exhibit increased CD57 expression and decreased CD56 expression, relative to effector T cells and/or central memory T cells in the third population of cells.
59. The method of any one of embodiments 49 to 55, wherein the cancer is selected from the group consisting of melanoma, cervical cancer, head and neck cancer, glioblastoma, ovarian cancer, sarcoma, pancreatic cancer, bladder cancer, breast cancer, triple negative breast cancer, and non-small cell lung carcinoma.
60. The method of any one of embodiments 49-59, wherein the CAR binds CD19, CD20, CD22, or BCMA.
61. The method of any one of embodiments 49-60, wherein number of TILs in a subject infused with both CAR T cells and TILs is more than number of TILs in a subject infused with TILs.
62. The method of any one of embodiments 49-60, wherein the CAR T cells comprise the modified cell 2 and modified cell 1 of FIG. 63.
63. A method of enhancing expansion of cells in a subject in need thereof or treating a subject having cancer, the method comprising:
administering an effective amount of a composition to the subject having a form of cancer expressing a tumor antigen, the composition comprising a first population of cells comprising a first CAR binding a first antigen, and a second population of cells comprising a second CAR binding a second antigen, wherein the second antigen is a tumor antigen and is different from the first antigen.
64. The method of embodiment 63, wherein the cells are T cells, NK cells, or dendritic cells.
65. The method of embodiment 63, wherein the first antigen comprises a cell surface molecule of a white blood cell (WBC), a tumor antigen, or a solid tumor antigen.
66. The method of embodiment 65, wherein the WBC is a granulocyte, a monocyte, or lymphocyte.
67. The method of embodiment 66, wherein the lymphocyte is a B cell.
68. The method of embodiment 65, wherein the cell surface molecule of the WBC is CD19, CD22, CD20, BCMA, CD5, CD7, CD2, CD16, CD56, CD30, CD14, CD68, CD11b, CD18, CD169, CD1c, CD33, CD38, CD138, or CD13.
69. The method of embodiment 65, wherein the cell surface molecule of the WBC is CD19, CD20, CD22, or BCMA.
70. The method of embodiment 65, wherein the cell surface molecule of the WBC is CD19.
71. The method of embodiment 63, wherein the tumor antigen is a solid tumor antigen.
72. The method of embodiment 71, wherein the solid tumor antigen is tMUC1, PRLR, CLCA1, MUC12, GUCY2C, GPR35, CR1L, MUC 17, TMPRSS11B, MUC21, TMPRSS11E, CD207, SLC30A8, CFC1, SLC12A3, SSTR1, GPR27, FZD10, TSHR, SIGLEC15, SLCBA3, KISS1R, QRFPR, GPR119, CLDN6, UPK2, ADAM12, SLC45A3, ACPP, MUC21, MUC16, MS4A12, ALPP, CEA, EphA2, FAP, GPC3, IL13-Rα2, Mesothelin, PSMA, ROR1, VEGFR-II, GD2, FR-α, ErbB2, EpCAM, EGFRvIII, B7-H3, CLDN18.2, or EGFR.
73. The method of embodiment 71, wherein the solid tumor antigen comprises tMUC1.
74. The method of embodiment 63, wherein the CAR comprises an antigen binding domain, a transmembrane domain, a co-stimulatory domain, and a CD3 zeta domain.
75. The method of embodiment 74, wherein the co-stimulatory domain comprises the intracellular domain of CD27, CD28, 4-1BB, OX40, CD30, CD40, PD-1, ICOS, lymphocyte function-associated antigen-1 (LFA-1), CD2, CD7, LIGHT, NKG2C, B7-H3, a ligand that binds CD83, or a combination thereof.
76. The method of embodiment 63, wherein the first CAR comprises a scFv binding CD19, an intracellular domain of 4-1BB or CD28, and a CD3 zeta domain, and the second CAR comprises a scFv binding tMUC1, an intracellular domain of 4-1BB or CD28, and a CD3 zeta domain.
77. The method of embodiment 63, wherein an antigen binding domain of the first CAR comprises SEQ ID NO: 5 and an antigen binding domain of the second CAR comprises SEQ ID NO: 70.
78. The method of embodiment 63, wherein the second population of cells comprises a lentiviral vector encoding the second CAR and a dominant negative form of PD-1.
79. The method of embodiment 63, wherein the first population of cells comprises a lentiviral vector encoding the first CAR and a therapeutic agent.
80. The method of embodiment 79, wherein the therapeutic agent comprises a cytokine.
81. The method of embodiment 80, wherein the cytokine is IL6 and/or INFγ.
82. The method of embodiment 80, wherein the cytokine is at least one of IL6, IL12, IL7, IL15, TNF-α, or IFNγ.
83. A method for in vitro cell preparation, the method comprising: contacting cells with (1) a first vector comprising a polynucleotide encoding a first antigen binding molecule that binds a first antigen and (2) a second vector comprising a polynucleotide encoding a second antigen binding molecule that binds a second antigen to obtain a population of modified cells, to obtain a mixed population of modified cells, wherein the first antigen is different from the second antigen.
84. A method for enhancing cell expansion in a subject having cancer, the method comprising: obtaining cells from the subject or a healthy donor; contacting the cells with (1) a first vector comprising a polynucleotide encoding a first antigen binding molecule that binds a first antigen and (2) a second vector comprising a polynucleotide encoding a second antigen binding molecule that binds a second antigen to obtain a mixed population of modified cells; and administering an effective amount of the mixed population of modified cells to the subject; wherein: the first antigen is different from the second antigen; and a level of the cell expansion in the subject is higher than a level of the cell expansion in a subject administered an effective amount of a population of modified cells that have been contacted with the first vector but not the first vector.
85. A method for treating a subject having cancer, the method comprising: obtaining cells from the subject or a healthy donor; contacting the cells with (1) a first vector comprising a polynucleotide encoding a first antigen binding molecule that binds a first antigen and (2) a second vector comprising a polynucleotide encoding a second antigen binding molecule that binds a second antigen to obtain a mixed population of modified cells; and administering an effective amount of the mixed population of modified cells to the subject; wherein: the first antigen is different from the second antigen.
86. A method for enhancing treatment of a subject having cancer, the method comprising: obtaining cells from the subject or a healthy donor; contacting the cells with (1) a first vector comprising a polynucleotide encoding a first antigen binding molecule that binds a first antigen and (2) a second vector comprising a polynucleotide encoding a second antigen binding molecule that binds a second antigen to obtain a mixed population of modified cells; and administering an effective amount of the mixed population of modified cells to the subject; wherein: the first antigen is different from the second antigen; and a level of inhibition of tumor growth in the subject is higher than a level of inhibition of tumor growth in a subject administered with an effective amount of a population of modified cells that have been contacted with the second vector but not the first vector.
87. A method for in vitro cell preparation, the method comprising: introducing a first vector comprising a polynucleotide encoding a first antigen binding molecule that binds a first antigen into a first population of cells; and introducing a second vector comprising a polynucleotide encoding a second antigen binding molecule that binds a second antigen into a second population of cells; and culturing the first and second population of cells separately; wherein the first antigen is different form the second antigen.
88. A method for enhancing cell expansion in a subject having cancer, the method comprising: introducing a first vector comprising a polynucleotide encoding a first antigen binding molecule that binds a first antigen into a first population of cells to obtain a first population of modified cells; introducing a second vector comprising a polynucleotide encoding a second antigen binding molecule that binds a second antigen into a second population of cells to obtain a second population of modified cells; and administering an effective amount of the first and second population of modified cells to the subject; wherein: the first antigen is different from the second antigen; and a level of the cell expansion in the subject is higher than a level of the cell expansion in a subject administered an effective amount of the second population of modified cells but not the first population of modified cells. In embodiments, the first population of modified cells and the second population of modified cells are administered simultaneously or sequentially.
89. A method for treating a subject having cancer, the method comprising: introducing a first vector comprising a polynucleotide encoding a first antigen binding molecule that binds a first antigen into a first population of cells to obtain a first population of modified cells; introducing a second vector comprising a polynucleotide encoding a second antigen binding molecule that binds a second antigen into a second population of cells to obtain a second population of modified cells; and administering an effective amount of the first and second population of modified cells to the subject; wherein the first antigen is different from the second antigen. In embodiments, the first population of modified cells and the second population of modified cells are administered simultaneously or sequentially.
90. A method for enhancing treatment of a subject having cancer, the method comprising: introducing a first vector comprising a polynucleotide encoding a first antigen binding molecule that binds a first antigen into a first population of cells to obtain a first population of modified cells; introducing a second vector comprising a polynucleotide encoding a second antigen binding molecule that binds a second antigen into a second population of cells to obtain a second population of modified cells; and administering an effective amount of the first and second population of modified cells to the subject, wherein: the first antigen is different from the second antigen; and a level of inhibition of tumor growth in the subject is higher than a level of inhibition of tumor growth in a subject administered with an effective amount of the second population of modified cells in the absence of the first population of modified cells. In embodiments, the first population of modified cells and the second population of modified cells are administered simultaneously or sequentially.
91. A method for enhancing T cell response, the method comprising: introducing a first vector comprising a polynucleotide encoding a first antigen binding molecule that binds a first antigen into a first population of cells; introducing a second vector comprising a polynucleotide encoding a second antigen binding molecule that binds a second antigen into a second population of cells; contacting cells expressing the second antigen with the first population of cells and the second population of cells; and measuring a level of the T cell response, wherein the level of T cell response is higher in the contacted cells than a level of the T cell response in cells contacted with the second population of cells without the first population of cells.
92. A method for enhancing T cell response, the method comprising: contacting a population of cells with a first vector comprising a polynucleotide encoding a first antigen binding molecule that binds a first antigen and a second vector comprising a polynucleotide encoding a second antigen binding molecule that binds a second antigen to obtain a mixed population of modified cells; contacting cells expressing the second antigen with the mixed population of modified cells; and measuring a level of the T cell response, wherein the level of T cell response is higher in the contacted cells than a level of the T cell response in cells contacted with the a population of cells contacted with the second vector without the first vector.
93. The method of any one of embodiments 83-92, wherein the cells are T cells, NK cells, or dendritic cells. In embodiments, the cells T cells.
94. The method of any one of embodiments 83-93, wherein the first antigen binding molecule binds a cell surface molecule of a WBC.
95. The method of embodiment 94, wherein the WBC is a granulocyte, a monocyte, or lymphocyte.
96. The method of embodiment 94, wherein the WBC is a B cell.
97. The method of embodiment 94, wherein the cell surface molecule of the WBC is CD19, CD22, CD20, BCMA, CD5, CD7, CD2, CD16, CD56, CD30, CD14, CD68, CD11b, CD18, CD169, CD1c, CD33, CD38, CD138, or CD13.
98. The method of embodiment 94, wherein the cell surface molecule of the WBC is CD19, CD20, CD22, or BCMA.
99. The method of embodiment 94, wherein the cell surface molecule of the WBC is CD19.
100. The method of any one of embodiments 83-99, wherein the second antigen binding molecule binds to a solid tumor antigen.
101. The method of embodiment 100, wherein the solid tumor antigen is tMUC1, PRLR, CLCA1, MUC12, GUCY2C, GPR35, CR1L, MUC 17, TMPRSS11B, MUC21, TMPRSS11E, CD207, SLC30A8, CFC1, SLC12A3, SSTR1, GPR27, FZD10, TSHR, SIGLEC15, SLC6A3, KISS1R, QRFPR, GPR119, CLDN6, UPK2, ADAM12, SLC45A3, ACPP, MUC21, MUC16, MS4A12, ALPP, CEA, EphA2, FAP, GPC3, IL13-Rα2, Mesothelin, PSMA, ROR1, VEGFR-II, GD2, FR-α, ErbB2, EpCAM, EGFRvIII, CLDN18.2, or EGFR.
102. The method of any one of embodiments 83-101, wherein the first and second binding molecules are CARs.
103. The method of embodiment 102, wherein the CAR comprises an extracellular domain, a transmembrane domain, and an intracellular domain, and the extracellular domain binds a tumor antigen.
104. The method of embodiment 103, wherein the intracellular domain comprising a co-stimulatory domain that comprises an intracellular domain of a co-stimulatory molecule selected from the group consisting of CD27, CD28, 4-1BB, OX40, CD30, CD40, PD-1, ICOS, lymphocyte function-associated antigen-1 (LFA-1), CD2, CD7, LIGHT, NKG2C, B7-H3, or a combination thereof.
105. The method of embodiment 105, wherein the intracellular domain comprises a CD3 zeta signaling domain.
106. The method of any one of embodiments 83-101, wherein the first binding molecule is a CAR, and the second binding molecule is a TCR.
107. The method of embodiment 106, wherein the T cell comprises a modified T Cell Receptor (TCR).
108. The method of embodiment 106, wherein the TCR is derived from spontaneously occurring tumor-specific T cells in patients.
109. The method of embodiment 106, wherein the TCR binds a tumor antigen.
110. The method of embodiment 109, wherein the tumor antigen comprises CEA, gp100, MART-1, p53, MAGE-A3, or NY-ESO-1.
111. The method of embodiment 106, wherein the TCR comprises TCRγ and TCRδ chains, TCRα and TCRβ chains, or a combination thereof.
112. The method of embodiment 106, wherein the second population of cells are derived from TILs.
113. The method of any one of embodiments 83-112, wherein the population of modified cells comprise cells comprising the first binding molecule and cells comprising the second binding molecules.
114. The method of any one of embodiments 83-112, wherein the population of modified cells comprise cells comprising the first binding molecule, cells comprising the second binding molecules, and cells comprising both the first binding molecule and the second binding molecule.
115. The method of any one of embodiments 83-112, wherein the T cell response is measured by the number of copies of CAR(s) and/or the amount of cytokine released. In embodiments, the cytokine released are IL-6 and/or IFNγ.
116. The method of any one of embodiments 83-112, wherein the T cell response comprises cytokine release, cell expansion, and/or activation levels.
117. The method of any one of embodiments 83-112, wherein the first vector further comprises a polynucleotide encoding IL-6, IFNγ, or a combination thereof.
118. The method of any one of embodiments 83-112, wherein the first vector further comprises a polynucleotide encoding IL-12.
119. The method of any one of embodiments 116 and 117, wherein the polynucleotide comprises a polynucleotide encoding NFAT and/or VHL.
120. The method of any one of embodiments 83-119, wherein the population of modified cells comprise cells expressing the first binding molecule and IL-6, IFNγ, or a combination thereof, cells expressing the second binding molecules, cells expressing the first and second molecules, and/or cells expressing the first binding molecule and IL-12.
121. The method of any one of embodiments 83-120, wherein the population of modified cells comprise cells expressing the second binding molecule and IL-6, IFNγ, or a combination thereof, cells expressing the second binding molecules, cells expressing the first and second molecules, and/or cells expressing the first binding molecule and IL-12.
122. The method of any one of embodiments 83-121, wherein the population of modified cells comprise cells expressing the second binding molecule and IL-6, IFNγ, or a combination thereof, cells expressing the second binding molecule, cells expressing the first and second molecules, and/or cells expressing the second binding molecule and IL-12.
123. The method of any one of embodiments 83-122, wherein the population of modified cells comprise cells expressing a dominant negative form of PD-1.
124. A bispecific chimeric antigen receptor, comprising: a first antigen binding domain, a second antigen binding domain, a cytoplasmic domain, and transmembrane domain, wherein the first antigen binding domain recognizes a first antigen, and the second antigen binding domain recognize a second antigen, and the first antigen is different from the second antigen.
125. The bispecific chimeric antigen receptor of embodiment 124, wherein the first antigen and the second antigen are not expressed on the same cell.
126. The bispecific chimeric antigen receptor of embodiment 124 or 125, wherein the first antigen is an antigen of a blood component, and the second antigen is an antigen of a solid tumor.
127. The bispecific chimeric antigen receptor of any one of embodiments 124-126, wherein the first antigen is CD19, and the second antigen is a tumor associated MUC1.
128. The bispecific chimeric antigen receptor of any one of embodiments 124-128, wherein the first antigen binding domain comprises amino acid sequence SEQ ID: 5 or 6.
129. The bispecific chimeric antigen receptor of any one of embodiments 124-128, wherein the second antigen binding domain comprises one of amino acid sequence SEQ ID: 70, 71, 72, 79, 80, or 81.
130. The bispecific chimeric antigen receptor of embodiment 124, wherein the CAR comprises amino acid sequence of any one of tanCARs listed in Table 5.
131. The bispecific chimeric antigen receptor of embodiment 124, wherein the first binding domain binds an antigen of nonessential tissues, and the second binding domain binds an antigen of tumor tissue. In embodiments, the first binding domain binds TSHR or GUCY2C. In embodiments, the second binding domain binds tMUC1, MAGE-E1, or Epithelial tumor antigen (ETA).
132. The bispecific chimeric antigen receptor of embodiment 124, wherein the first binding domain binds a tissue specific antigen, and the second binding domain binds an antigen expressed on more than one tissue. In embodiments, the first binding domain binds TSHR or PRLR. In embodiments, the second binding domain binds tMUC1, MAG-E1, or ETA.
133. The bispecific chimeric antigen receptor of embodiment 124, wherein the first binding domain binds an antigen of normal tissue, and the second binding domain binds an antigen expressed on tumor tissue. In embodiments, the first binding domain binds ACPP, TSHR, GUCY2C, UPK2, CLDN18.2, PSMA, DPEP3, CXCR5, B7-H3, MUC16, SIGLEC-15, CLDN6, Muc17, PRLR, or FZD10. In embodiments, the second binding domain binds tMUC1, MAG-E1, or ETA.
134. The bispecific chimeric antigen receptor of any one of embodiments 123, wherein the first binding domain binds to an antigen that is expressed on non-malignant cells, and the second binding domain binds an antigen that is expressed on tumor cells and not on corresponding non-malignant cells.
135. A cell comprising the bispecific CAR of any one of embodiments 123-134.
136. A nucleic acid encoding the bispecific CAR of any one of embodiments 123-134.
137. A method of enhancing T cell response, enhancing treatment of cancer, treating cancer in a subject, treating a subject having a tumor, or inhibiting the growth of a tumor, the method comprising: administering an effective amount of cell of embodiment 135.
136. The use of the cell, the bispecific CAR, population of modified cells, the composition, or the method of any one of embodiments 1-135 for the treatment of a subject in need thereof.
137. The use of the cell, the bispecific CAR, population of modified cells, the composition, or the method of embodiment 136, wherein the subject has cancer.

### EXAMPLES

### Example 1. Bispecific CARs

[0312] Lentiviral vectors that encode individual CAR molecules were generated and transfected with T cells, which are elaborated below. Techniques related to cell cultures, construction of cytotoxic T lymphocyte assay may be found in “Control of large, established tumor xenografts with genetically retargeted human T cells containing CD28 and CD137 domains,” PNAS, Mar. 3, 2009, vol. 106 no. 9, 3360-3365 and “Chimeric Receptors Containing CD137 Signal Transduction Domains Mediate Enhanced Survival of T Cells and Increased Antileukemic Efficacy In Vivo,” Molecular Therapy, August 2009, vol. 17 no. 8, 1453-1464, which are incorporated herein by reference in its entirety.

[0313] On Day 0, peripheral blood was drawn from healthy volunteers and sorted to collect CD3+ T cells. CD3/CD28 Dynabeads was added to the collected CD3+ T cells in a 1:1 ratio. On Day 1, the activated CD3+ T cells were transfected with vectors including CD19 CAR (MOI=15; the binding domain of the CAR being SEQ ID NO: 5) and vectors including TSHR CAR (MOI=92; the binding domain of the CAR being SEQ ID NO: 8), and vectors including TSHR-CD19 bispecific CAR (MOI=92; the binding domain of the CAR being SEQ ID NO: 435). More structure and sequence information are provided in FIG. 7 and Table 5. On Day 2, culture media were changed, The lentivirus was removed, and the cells were resuspended in fresh media. On Day 5, flow detection of CAR expression was performed. Various expression rates were observed (CD19 CAR 17.45%, TSHR CAR 76.84%, and TSHR-CD19 bispecific CAR 20.59%). Also, on Day 0, peripheral blood was drawn from healthy volunteers and sorted to collect CD3+ T cells. CD3/CD28 Dynabeads were added to the collected CD3+ T cells in a 1:1 ratio. On Day 1, the activated CD3+ T cells were transfected with vectors including CD19 CAR (MOI=2; the binding domain of the CAR being SEQ ID NO: 5) and vectors including tMUC1 CAR (MOI=30; the binding domain of the CAR being SEQ ID NO: 70), and vectors including tMUC1-CD19 bispecific CAR (MOI=95; the binding domain of the CAR being SEQ ID NO: 437), and vectors including CLDN18.2-CD19 (18.2-CD19) bispecific CAR (MOI=180, the binding domain of the CAR being SEQ ID No: 439). More sequence information is provided in FIGS. 10, 12, and 13 and Table 5. On Day 2, culture media were changed. The lentivirus was removed, and the cells were resuspended in fresh media. On Day 5, flow detection of CAR expression was performed. Various expression rates were observed (CD19CAR 68.28%, tMUC1CAR 31.58%, and tMUC1CD19 bispecific CAR 28.11% and 35.11%).

[0314] As shown in FIG. 8, 0.2 or 1×10⁴ CAR T cells and 1×10⁴ Nalm6 or B-CPAB-B tumor cells were co-cultured for 24 hours (hrs), and the supernatant was collected. IFNγ release was detected. Nalm6 was a CD19-positive tumor cell, and B-CPAB-B was a TSHR positive tumor cell. As shown in the left panel of FIG. 8, CD19 CAR T cells released more IFNγ in response to Nalm6 as compared to that released in response to B-CPAB-B. As shown in the middle panel, TSHR CAR T cells released more IFNγ in response to B-CPAB-B as compared to that released in response to Nalm6. As shown in the right panel, bispecific CAR T cells released significant amount of IFNγ in response to each of Nalm6 and B-CPAB-B. These results indicated that bispecific CAR T cells can be stimulated by both CD19-positive or TSHR-positive cells. 10⁵ CAR T cells and 10⁵ Nalm6 or B-CPAB-B tumor cells were co-cultured for 24 hours, and CD137 expression of CAR T CD8 positive cells was then detected by flow cytometry. The left panel of FIG. 9 showed CD137 expression of CAR T cells not co-cultured with tumor cells, while the middle and right showed CD137 expression of CAR T cells co-cultured with Nalm6 or B-CPAB-B. The results demonstrated that bispecific CAR T (TSHR-CD19 bispecific CAR) were activated by both Nalm6 and B-CPAB-B. Similar cytokine release assays were performed and showed that bispecific CAR T (CLDN18.2-CD19 bispecific CAR or CLDN18.2-19tan CAR) cells were activated by both Nalm6 and cells expressing CLDN18.2 (FIGS. 12-15).

[0315] FIG. 12 shows schematic structure of constructs of vectors encoding CAR molecules. FIG. 13 shows expression of the CAR molecules shown in FIG. 12. Since CD19 CAR included a humanized antibody, 18.2 CAR is a murine antibody. Therefore, human and murine CAR antibodies were used for detection. The ratio of expression of the two antibodies was detected with bispecific CAR, which was close to 1:1, indicating that the expression of bispecific CAR was as expected. FIG. 14 shows results of IFNγ release of co-culturing CAR T cells and tumor cells. The experiment was carried out by co-culturing with 0.2 or 1×10⁴ CAR T cells and 1×10⁴ 293T or KATO III-18.2+ or Nalm-6 cells. The supernatant was collected after 24 hrs to detect IFN-γ. Nalm-6 is a CD19 T cell; KATO 111-18.2+ is a cell that overexpresses CLDN18.2; and 293T is a double-negative cell that does not express CD19 and CLDN18.2. As shown, 18.2 CAR T showed significant IFN-γ release when co-cultured with KATOIII-18.2+ cells, indicating that KATOIII-18.2+ can be recognized by 18.2 CAR T cells and released IFN-γ to kill target cells; Nalm-6 was also recognized by CD19 CAR T cells and released IFN-γ to kill target cells; 18.2-CD19 bispecific CAR (18.2-19tan CAR) had significant IFN-γ release when co-cultured with KATOIII-18.2+ and Nalm-6. In addition, Nalm-6 could not stimulate the release of IFN-γ from 18.2 CAR T cells, and CD19 CAR T cells could not stimulate the release of IFN-γ by KATO III-18.2+, indicating that both CAR T cells are specific. In conclusion, 18.2-CD19 bispecific CAR T cells can specifically recognize 18.2 and CD19-positive target cells, and release IFN-γ to kill target cells.

[0316] FIG. 15 shows flow cytometry results depicting CD137 expression for co-culturing of CAR T cells and tumor cells. 1×10⁴ CAR T cells were co-cultured with 1×10⁴ 293T-WT or KATOIII-18.2+ or Nalm-6 cells. CD137 expression of CAR T CD8+ cells was measured by flow cytometry after 48 Hours. The left column shows CD137 expression of CAR T cells co-cultured with 293T. CD19 CAR expression is absent in the CD19 CAR group, the 18.2 CAR group, and the 18.2-19 tan CAR group. It can be seen that the 293T has no specific antigen expression and cannot activate CAR T cells. In the middle column, CAR T cells were co-cultured with KATO III-18.2+ cells with high expression of 18.2 protein. The expression of CD137 in the 18.2 CAR group was 8.77%, and the expression of CD137 in the 18.2-19 bispecific CAR group was 6.36%. The expression of CD137 was not observed in the CD19 CAR group. 18.2-CAR T and 18.2-CD19 bispecific CAR T recognized and activated the 18.2 protein in KATOIII-18.2+; CD19 CAR T did not. The right column is a co-culture of CAR T cells with Nalm-6 cells, which are CD19+ cells that are specifically recognized and activated by CD19 CAR T cells. The results showed that the expression of CD137 in the CD19 CAR group was 11.14%, the expression of CD137 in the 18.2-19 bispecific CAR group was 10.55%, and the expression in the 18.2 CAR group was not detectable. CD19 CAR and 18.2-CD19 bispecific CAR can be activated by Nalm-6, while 18.2 CAR failed to activate Nalm-6. In conclusion, it was demonstrated that 18.2-CD19 bispecific CAR T cells can specifically recognize the 18.2 antigen and the CD19 antigen. Since CD137 is a marker protein for the activation of T cells, the level of CD137 up-regulation of CAR T cells, after co-culturing with CAR T cells and substrate target cells, can be used to determine whether CAR T cells are activated.

[0317] Abnormal glycosylation is known to be common in many tumors, such as the abnormal glycosylation of MUC1 (tMUC1). A CAR binding tMUC1 may include a scFv based on the 5E5 antibody. Many tumors specifically express certain characteristic targets. More information of tumor markers and their corresponding cancer types are listed in Table 3. The examples include two scFvs joined by linker to form a tandem CAR (tanCAR) comprising the two scFvs.

TABLE 3
CAR T cells and substrate cells

| Numbering | Remarks |
|---|---|
| 6917 | CAR-5e528z |
| 6921 | CAR-ACPP-28Z |
| 2529 | TanCAR 28z ACPP + G4S + 5e5LH |
| 2530 | TanCAR 28z ACPP + G4S + 5e5HL |
| 2533 | TanCAR 28z 5e5 + G4S + ACPP LH |
| 2534 | TanCAR 28z 5e5 + G4S + ACPP HL |
| MCF-7 | Breast cancer cell lines with high expression of tnMUC1 |
| PC3-ACPP | Human prostate cancer cells that overexpress ACPP |
| 2407 | tMUC1CAR-41bb |
| 163 | CLDN 18.2CAR |
| 2517 | TanCAR 5E5 LH + G4S + 163LH |
| 1604 | TSHR - 4-1BB |
| 2407 | t MUC1 - 4-1BB |
| 2519 | TSHR - G4S - tMUC1 - 4-1BB |
| 2521 | tMUC1 - G4S - TSHR - 4-1BB |

[0318] On Day 0, peripheral blood was drawn from healthy volunteers. CD3+ T cells were sorted with pan T kit and activated by CD3/CD28 Dynabeads at a ratio of 3:1. On Day 1, the activated CD3+ T cells were infected. Several groups of cells (each 1.00 E+06 T cells) were infected with Vectors based on the Table 4, and remaining cells were used as NT (non-transfected). On Day 2, the lentivirus and the Dynabeads were removed, and the culture media were replaced. On Day 6, the CAR ratio and cell phenotype of CAR T cells were measured in each group using flow cytometry assay. Since anti-ACPP antibodies are a humanized antibody and anti-MUC1 antibodies are a murine antibody, a rabbit anti-human CAR antibody and rabbit anti-mouse CAR antibody were used to detect expression of these two scFvs, respectively. On Day 7, the experiment was carried out according to Table 4. The samples were flow-stained after 24 hours of full activation. The supernatant was collected for detection of Cytometric Bead Array (CBA), and carboxyfluorescein succinimidyl ester (CFSE) staining was performed to observe the proliferation. The cells were co-cultured with fluorescent substrate cells, and the survival of cells with fluorescent substrates was observed to determine the killing effect.

TABLE 4
cells for co-culturing assay

| | | SEQ | | Number of | hCAR + | mCAR + | |
|---|---|---|---|---|---|---|---|
| ID | Vectors | ID | MOI | cells | (ACPP) | (tMUC1) | Co-culture |
| 6917 | CAR-5e528z | | 13.15 | 1.00E+06 | | 62.2 | Co-cultured |
| 6921 | CAR-ACPP-28z | | 23.05 | 1.00E+06 | 61.18 | | with |
| 2529 | TanCAR 28z | | 51.65 | 1.00E+06 | 55.21 | 49.54 | substrate |
| | ACPP + G4S + 5e5LH | | | | | | cells |
| 2530 | TanCAR 28z | | 52.49 | 1.00E+06 | 70.51 | 60.49 | (MCF-7, |
| | ACPP + G4S + 5e5HL | | | | | | PC3- |
| 2533 | TanCAR 28z 5e5 + | | 51.04 | 1.00E+06 | 55.94 | 63.1 | ACPP, |
| | G4S + ACPP LH | | | | | | 293T) |
| 2534 | TanCAR 28z 5e5 + | | 52.28 | 1.00E+06 | 34.21 | 31.47 | |
| | G4S + ACPP HL | | | | | | |
| 2407 | tMUC1CAR-41bb | | 8.44 | 1.00E+06 | | 25.68 | Co-cultured |
| 163 | CLDN 18.2CAR | | 64.8 | 1.00E+06 | | 41.06 | with |
| 2517 | TanCAR 5E5 | | 59.7 | 1.00E+06 | | 44.42 | substrate |
| | LH + G4S + 163LH | | | | | | cells |
| | | | | | | | (MCF-7, |
| | | | | | | | KATO3 +, |
| | | | | | | | 293T) |

[0319] FIG. 66 provides histograms showing expression of several markers on CAR T cells and tanCAR T cells using flow cytometry assay. NT, 6917, 6921, 2529, 2530, 2533, as well as 2534 and substrate cells (MCF-7, PC3-acpp, 293T cells) were co-cultured for 24 hours and flow cytometry assay was performed on Day 8. CAR T cells and three substrate cells (293T, MCF-7, PC3-acpp) were co-cultured for 24 hrs. Flow cytometry assay was performed after the activation of CAR T cells. In FIG. 66, the vertical coordinates are CAR+CD137+ cells (the total CAR+ cells) and CAR+CD25+ (total CAR+ cells), respectively. From the expression of CD137 and CD25, four types of tanCAR cells were effectively activated by corresponding substrate cells. The statistical analysis of the expression of CD40L by flow cytometry was performed after CAR T cells was co-cultured with substrate cells (293T, MCF-7 and PC3-acpp) for 24h. Four types of tanCAR cells expressed CD40L, which can activate CD40+ and other immune cells of the immune system, such as B cells, activated monocytes, DCs, etc.

[0320] FIG. 67 provides histograms showing cytokine release of CAR T cells and tanCAR T cells. NT, 6917, 6921, 6921, 2529, 2530, 2533, as well as 2534 and substrate cells (MCF-7, PC3-acpp, 293T cells), were co-cultured for 24 hours and cytokine release was measured on Day 8.

[0321] FIG. 68 shows the expansion of cells in each group after 5 days of stimulation with the corresponding substrate cells. As compared to control groups, tanCAR groups showed apparent expansion in response to both substrate cells. Proliferation of 6917, 6921, 2529, 2530, 2533, 2534, and NT was measured on Day 12 after co-culturing with substrate cells (MCF-7, PC3-acpp, 293T cells) for 5 days.

[0322] FIG. 69 shows killing assay results. The results indicate that 6917 inhibited MCF-7 and 6921 inhibited PC3-ACPP. The four groups of tanCAR T cells killed both substrate cells. NT was negative for the experiment. The control contained only tumor cells. Killing assay was performed for 6917, 6921, 2529, 2530, 2533, 2534 and NT cells after co-culturing with substrate cells for five days.

[0323] FIG. 70 provides histograms showing expression of several markers on other CAR T cells and tanCAR T cells and cytokine release using flow cytometry assay. 2407, 163, and 2517 were co-cultured with MCF-7, KATO3+, and 293T cells for 24 hours on Day 8, and cytokine release assay were performed. TanCAR 2517 were activated by both MCF-7 and KATO3+ substrate cells, and the intensity and proportion were close to single CAR. The corresponding CAR T cells were co-cultured with substrate cells (293T, MCF-7, and KATO3+) for 24 hrs, and the expression of CD40L was detected by flow cytometry.

[0324] FIG. 71 cytokine release of various CAR T cells and tanCAR T cells in response to substrate cells. The experimental process and experimental design were similar to those of experiments above.

TABLE 5
Sequence IDs and corresponding identifiers

| | SEQ | | SEQ | | SEQ |
|---|---|---|---|---|---|
| | ID | | ID | | ID |
| Name | NO: | Name | NO: | Name | No: |
| SP | 1 | UPK2 | 101 | Construct of | 201 |
| | | | | MUC1-5E5-A- | |
| | | | | IRES-CD19-A | |
| Hinge & | 2 | ADAM12 | 102 | CAR 1 of MUC1- | 202 |
| transmembrane | | | | 5E5-A-IRES- | |
| domain | | | | CD19-A | |
| Co-stimulatory | 3 | SLC45A3 | 103 | CAR 2 of MUC1- | 203 |
| domain | | | | 5E5-A-IRES- | |
| | | | | CD19-A | |
| CD3-zeta | 4 | ACPP | 104 | Construct of | 204 |
| | | | | MUC1-5E5-B- | |
| | | | | IRES-CD19-A | |
| scFv Humanized | 5 | MUC21 | 105 | CAR 1 of MUC1- | 205 |
| CD19 | | | | 5E5-B-IRES- | |
| | | | | CD19-A | |
| scFv CD19 | 6 | MUC16 | 106 | CAR 2 of MUC1- | 203 |
| | | | | 5E5-B-IRES- | |
| | | | | CD19-A | |
| scFv FZD10 | 7 | MS4A12 | 107 | Construct of | 206 |
| | | | | MUC1-5E5-A- | |
| | | | | IRES-CD19-B | |
| scFv TSHR | 8 | ALPP | 108 | CAR 1 of MUC1- | 202 |
| | | | | 5E5-A-IRES- | |
| | | | | CD19-B | |
| scFv PRLR | 9 | SLC2A14 | 109 | CAR 2 of MUC1- | 207 |
| | | | | 5E5-A-IRES- | |
| | | | | CD19-B | |
| scFv Muc 17 | 10 | GS1-259H13.2 | 110 | Construct of | 208 |
| | | | | MUC1-5E5-B- | |
| | | | | IRES-CD19-B | |
| scFv GUCY2C | 11 | ERVFRD-1 | 111 | CAR 1 of MUC1- | 205 |
| | | | | 5E5-B-IRES- | |
| | | | | CD19-B | |
| scFv CD207 | 12 | ADGRG2 | 112 | CAR 2 of MUC1- | 207 |
| | | | | 5E5-B-IRES- | |
| | | | | CD19-B | |
| Prolactin (ligand) | 13 | ECEL1 | 113 | Construct of | 209 |
| | | | | MUC1-2-A-IRES- | |
| | | | | CD19-A | |
| scFv CD3 | 14 | CHRNA2 | 114 | CAR 1 of MUC1-2- | 210 |
| | | | | A-IRES-CD19-A | |
| scFv CD4 | 15 | GP2 | 115 | CAR 2 of MUC1-2- | 203 |
| | | | | A-IRES-CD19-A | |
| scFv CD4-2 | 16 | PSG9 | 116 | Construct of | 211 |
| | | | | MUC1-2-B-IRES- | |
| | | | | CD19-A | |
| scFv CD5 | 17 | SIGLEC15 | 117 | CAR 1 of MUC1-2- | 212 |
| | | | | B-IRES-CD19-A | |
| CD19 antigen | 18 | SLC6A3 | 118 | CAR 2 of MUC1-2- | 203 |
| | | | | B-IRES-CD19-A | |
| FZD10 antigen | 19 | KISS1R | 119 | Construct of | 213 |
| | | | | MUC1-2-A-IRES- | |
| | | | | CD19-B | |
| TSHR antigen | 20 | QRFPR | 120 | CAR 1 of MUC1-2- | 210 |
| | | | | A-IRES-CD19-B | |
| PRLR antigen | 21 | GPR119 | 121 | CAR 2 of MUC1-2- | 207 |
| | | | | A-IRES-CD19-B | |
| Muc 17 antigen | 22 | CLDN6 | 122 | Construct of | 214 |
| | | | | MUC1-2-B-IRES- | |
| | | | | CD19-B | |
| GUCY2C antigen | 23 | SP-2 | 123 | CAR 1 of MUC1-2- | 212 |
| | | | | B-IRES-CD19-B | |
| CD207 antigen | 24 | Linker-2 | 124 | CAR 2 of MUC1-2- | 207 |
| | | | | B-IRES-CD19-B | |
| CD3 antigen | 25 | Hinge-2 | 125 | Construct of | 215 |
| | | | | MUC1-5E5-A- | |
| | | | | IRES-hCD19-A | |
| CD4 antigen | 26 | TM-2 | 126 | CAR 1 of MUC1- | 202 |
| | | | | 5E5-A-IRES- | |
| | | | | hCD19-A | |
| CD5 antigen | 27 | 4-1BB-2 | 127 | CAR 2 of MUC1- | 216 |
| | | | | 5E5-A-IRES- | |
| | | | | hCD19-A | |
| CAR CD19 nucleic | 28 | CD3 zeta-2 | 128 | Construct of | 217 |
| acid | | | | MUC1-5E5-B- | |
| | | | | IRES-hCD19-A | |
| Hinge & TM | 29 | CLDN6-CAR-1 | 129 | CAR 1 of MUC1- | 205 |
| domain B | | | | 5E5-B-IRES- | |
| | | | | hCD19-A | |
| Hinge & TM | 30 | ScFv CLDN6-CAR- | 130 | CAR 2 of MUC1- | 216 |
| domain A | | 1 | | 5E5-B-IRES- | |
| | | | | hCD19-A | |
| Hinge & TM | 31 | ScFv VL CLDN6- | 131 | Construct of | 218 |
| domain D | | CAR-1 | | MUC1-5E5-A- | |
| | | | | IRES-hCD19-B | |
| Hinge & TM | 32 | ScFv VH CLDN6- | 132 | CAR 1 of MUC1- | 202 |
| domain C | | CAR-1 | | 5E5-A-IRES- | |
| | | | | hCD19-B | |
| Hinge domain D | 33 | CLDN6-CAR-2 | 133 | CAR 2 of MUC1- | 219 |
| | | | | 5E5-A-IRES- | |
| | | | | hCD19-B | |
| Hinge domain C | 34 | ScFv CLDN6-CAR- | 134 | Construct of | 220 |
| | | 2 | | MUC1-5E5-B- | |
| | | | | IRES-hCD19-B | |
| Hinge domain B | 35 | ScFv VL CLDN6- | 135 | CAR 1 of MUC1- | 205 |
| | | CAR-2 | | 5E5-B-IRES- | |
| | | | | hCD19-B | |
| Hinge domain A | 36 | ScFv VH CLDN6- | 136 | CAR 2 of MUC1- | 219 |
| | | CAR-2 | | 5E5-B-IRES- | |
| | | | | hCD19-B | |
| TM domain D | 37 | CLDN6-CAR-3 | 137 | Construct of | 221 |
| | | | | MUC1-2-A-IRES- | |
| | | | | hCD19-A | |
| TM domain A | 38 | scFv CLDN6-CAR- | 138 | CAR 1 of MUC1-2- | 210 |
| | | 3 | | A-IRES-hCD19-A | |
| CD19 extracellular | 39 | scFv VL CLDN6- | 139 | CAR 2 of MUC1-2- | 216 |
| domain | | CAR-3 | | A-IRES-hCD19-A | |
| TM domain C or B | 40 | scFv VH CLDN6- | 140 | Construct of | 222 |
| | | CAR-3 | | MUC1-2-B-IRES- | |
| | | | | hCD19-A | |
| WTCD3zeta | 41 | CLDN6-CAR-4 | 141 | CAR 2CAR 1 of | 212 |
| | | | | MUC1-2-B-IRES- | |
| | | | | hCD19-A | |
| WTCD3zeta- | 42 | scFv CLDN6-CAR- | 142 | Construct of | 216 |
| BCMACAR full | | 4 | | MUC1-2-B-IRES- | |
| length | | | | hCD19-A | |
| BCMA | 43 | scFv VL CLDN6- | 143 | Construct of | 223 |
| | | CAR-4 | | MUC1-2-A-IRES- | |
| | | | | hCD19-B | |
| BCMA CAR vector | 44 | scFv VH CLDN6- | 144 | CAR 1 of MUC1-2- | 210 |
| | | CAR-4 | | A-IRES-hCD19-B | |
| BCMA CAR vector | 45 | SIGLEC-15-CAR-1 | 145 | CAR 2 of MUC1-2- | 219 |
| | | | | A-IRES-hCD19-B | |
| VL anti-CD5 | 46 | scFv SIGLEC-15- | 146 | Construct of | 224 |
| | | CAR-1 | | MUC1-2-B-IRES- | |
| | | | | hCD19-B | |
| VH anti-CD5 | 47 | scFv VL SIGLEC- | 147 | CAR 1 of MUC1-2- | 212 |
| | | 15-CAR-1 | | B-IRES-hCD19-B | |
| VL anti-CD4 | 48 | scFv VH SIGLEC- | 148 | CAR 2 of MUC1-2- | 219 |
| | | 15-CAR-1 | | B-IRES-hCD19-B | |
| VH anti-CD4 | 49 | VL1 VH1 SIGLEC- | 149 | Construct of | 225 |
| | | 15-CAR-2 | | MUC1-5E5-A- | |
| | | | | IRES-CD22-A | |
| VL anti-CD3 | 50 | VL1 VH2 SIGLEC- | 150 | CAR 1 of MUC1- | 202 |
| | | 15-CAR-3 | | 5E5-A-IRES- | |
| | | | | CD22-A | |
| VH anti-CD3 | 51 | VL1 VH3 SIGLEC- | 151 | CAR 2 of MUC1- | 226 |
| | | 15-CAR-4 | | 5E5-A-IRES- | |
| | | | | CD22-A | |
| TSHR extracellular | 52 | VL1 VH 4 SIGLEC- | 52 | Construct of | 227 |
| domain | | 15-CAR-5 | | MUC1-5E5-B- | |
| | | | | IRES-CD22-A | |
| VH region of | 53 | VL2 VH 1 SIGLEC- | 153 | CAR 1 of MUC1- | 205 |
| BCMA scFv | | 15-CAR-6 | | 5E5-A-IRES- | |
| | | | | CD22-A | |
| VL region of BCMA | 54 | VL2 VH2 SIGLEC- | 154 | CAR 2 of MUC1- | 226 |
| scFv | | 15-CAR-7 | | 5E5-A-IRES- | |
| | | | | CD22-A | |
| VH region of CD14 | 55 | VL2 VH3 SIGLEC- | 155 | Construct of | 228 |
| scFv | | 15-CAR-8 | | MUC1-5E5-A- | |
| | | | | IRES-CD22-B | |
| VL region of CD14 | 56 | VL2 VH4 SIGLEC- | 156 | MUC1-5E5-A- | 202 |
| scFv | | 15-CAR-9 | | IRES-CD22-B CAR | |
| | | | | 1 | |
| VH region of CD33 | 57 | VL1 SIGLEC-15- | 157 | MUC1-5E5-A- | 229 |
| scFv | | CAR | | IRES-CD22-B CAR | |
| | | | | 2 | |
| VL region of CD33 | 58 | VL2 SIGLEC-15- | 158 | MUC1-5E5-B- | 230 |
| scFv | | CAR | | IRES-CD22-B | |
| CD22CAR | 59 | VH1 SIGLEC-15- | 159 | CAR 1 of MUC1- | 205 |
| | | CAR | | 5E5-B-IRES- | |
| | | | | CD22-B | |
| BCMACAR | 60 | VH2 SIGLEC-15- | 160 | CAR 2 of MUC1- | 229 |
| | | CAR | | 5E5-B-IRES- | |
| | | | | CD22-B | |
| MUC1CAR | 61 | VH3 SIGLEC-15- | 161 | Construct of | 231 |
| | | CAR | | MUC1-2-A-IRES- | |
| | | | | CD22-A | |
| m19CAR-IRES- | 62 | VH4 SIGLEC-15- | 162 | CAR 1 of MUC1-2- | 210 |
| MUC1CAR | | CAR | | A-IRES-CD22-A | |
| hCD19CAR-IRES- | 63 | MUC16-CAR-1 | 163 | CAR 2 of MUC1-2- | 226 |
| MUC1CAR | | | | A-IRES-CD22-A | |
| hCD22CAR-IRES- | 64 | scFv MUC16-CAR- | 164 | MUC1-2-B-IRES- | 232 |
| MUC1CAR | | 1 | | CD22-A | |
| BCMACAR-IRES- | 65 | scFv VL MUC16- | 165 | MUC1-2-B-IRES- | 212 |
| MUC1CAR | | CAR-1 | | CD22-A CAR 1 | |
| mCD19CAR-2A- | 66 | scFv VH MUC16- | 166 | MUC1-2-B-IRES- | 226 |
| MUC1CAR | | CAR-1 | | CD22-A CAR 2 | |
| hCD19CAR-2A- | 67 | MUC16-CAR-2 | 167 | MUC1-2-A-IRES- | 233 |
| MUC1CAR | | | | CD22-B | |
| hCD22CAR-2A- | 68 | scFv MUC16-CAR- | 168 | MUC1-2-A-IRES- | 210 |
| MUC1CAR | | 2 | | CD22-B CAR 1 | |
| BCMA-2A- | 69 | scFv VL MUC16- | 169 | MUC1-2-A-IRES- | 229 |
| MUC1CAR | | CAR-2 | | CD22-B CAR 2 | |
| Tumor associated | 70 | scFv VH MUC16- | 170 | Construct of | 234 |
| MUC1 scFv 1 | | CAR-2 | | MUC1-2-B-IRES- | |
| | | | | CD22-B | |
| Tumor associated | 71 | KISS1R-CAR | 171 | CAR 1 of MUC1-2- | 212 |
| MUC1 scFv-1 VH | | | | B-IRES-CD22-B | |
| Tumor associated | 72 | Ligent peptide | 172 | CAR 2 of MUC1-2- | 229 |
| MUC1 scFv-1 VL | | KISS1R-CAR | | B-IRES-CD22-B | |
| Tumor associated | 73 | ZFLm1 (left) RS | 173 | Construct of | 235 |
| MUC1 scFv-1 VL | | aa | | MUC1-5E5-A- | |
| CDR 1 | | | | IRES-CD14-A | |
| L2D8-2 (hCAR VL) | 74 | ZFLm1 (left) F1 | 174 | CAR 1 of MUC1- | 202 |
| | | | | 5E5-A-IRES- | |
| | | | | CD14-A | |
| Tumor associated | 75 | ZFLm1 (left) F2 | 174 | CAR 2 of MUC1- | 236 |
| MUC1 scFv-1 VL | | | | 5E5-A-IRES- | |
| CDR 3 | | | | CD14-A | |
| Tumor associated | 76 | ZFLm1 (left) F3 | 176 | Construct of | 237 |
| MUC1 scFv-1 VH | | | | MUC1-5E5-B- | |
| CDR 1 | | | | IRES-CD14-A | |
| Tumor associated | 77 | ZFLm1 (left) F4 | 177 | CAR 1 of MUC1- | 205 |
| MUC1 scFv-1 VH | | | | 5E5-B-IRES- | |
| CDR 2 | | | | CD14-A | |
| Tumor associated | 78 | ZFLm1 (left) F5 | 178 | CAR 2 of MUC1- | 236 |
| MUC1 scFv-1 VH | | | | 5E5-B-IRES- | |
| CDR 3 | | | | CD14-A | |
| Tumor associated | 79 | ZFLm1 (left) F6 | 179 | Construct of | 238 |
| MUC1 scFv2 | | | | MUC1-5E5-A- | |
| | | | | IRES-CD14-B | |
| Tumor associated | 80 | ZFRm1-4 (right) | 180 | CAR 1 of MUC1- | 202 |
| MUC1 scFv2 VH | | RS aa | | 5E5-A-IRES- | |
| | | | | CD14-B | |
| Tumor associated | 81 | ZFRm1-4 (right) | 181 | CAR 2 of MUC1- | 239 |
| MUC1 scFv2 VL | | F1 | | 5E5-A-IRES- | |
| | | | | CD14-B | |
| Tumor associated | 82 | ZFRm1-4 (right) | 182 | Construct of | 240 |
| MUC1 scFv-2 VL | | F2 | | MUC1-2-A-IRES- | |
| CDR 1 | | | | CD14-A | |
| Tumor associated | 83 | ZFRm1-4 (right) | 184 | CAR 1 of MUC1-2- | 210 |
| MUC1 scFv-2 VL | | F3 | | A-IRES-CD14-A | |
| CDR 2 | | | | | |
| Tumor associated | 84 | ZFRm1-4 (right) | 184 | CAR 2 of MUC1-2- | 236 |
| MUC1 scFv-2 VL | | F4 | | A-IRES-CD14-A | |
| CDR 3 | | | | | |
| ‘Tumor associated | 85 | δ chain-1 of | 185 | Construct of | 241 |
| MUC1 scFv-2VH | | Vγ9Vδ2 | | MUC1-2-B-IRES- | |
| CDR 1 | | | | CD14-A | |
| Tumor associated | 86 | γ chain-2 of Vγ9Vδ2 | 186 | CAR 1 of MUC1-2- | 212 |
| MUC1 scFv-2 VH | | | | B-IRES-CD14-A | |
| CDR 2 | | | | | |
| Tumor associated | 87 | δ chain-2 of Vγ9Vδ2 | 187 | CAR 2 of MUC1-2- | 236 |
| MUC1 scFv-2 VH | | | | B-IRES-CD14-A | |
| CDR 3 | | | | | |
| GSTA motif | 88 | Vγ9Vδ2 TCR-1: | 188 | Construct of | 242 |
| | | DG. SF13 | | MUC1-2-A-IRES- | |
| | | δ chain | | CD14-B | |
| Modified PD-1 | 89 | Vγ9Vδ2 TCR-1: | 189 | CAR 1 of MUC1-2- | 210 |
| intracellular | | DG. SF13 δ chain | | A-IRES-CD14-B | |
| domain −1 | | | | | |
| Modified PD-1 | 90 | Vγ9Vδ2 TCR-2: | 190 | CAR 2 of MUC1-2- | 239 |
| intracellular | | DG. SF68: | | A-IRES-CD14-B | |
| domain −2 | | γ chain | | | |
| Modified PD-1 | 91 | Vγ9Vδ2 TCR-2: | 191 | Construct of | 243 |
| intracellular | | DG. SF68: | | MUC1-2-B-IRES- | |
| domain −3 | | δ chain | | CD14-B | |
| Modified PD-1 | 92 | Vγ9Vδ2 TCR-3: | 192 | CAR 1 of MUC1-2- | 212 |
| intracellular | | 12G12: | | B-IRES-CD14-B | |
| domain −4 | | γ chain | | | |
| Modified PD-1 | 93 | Vγ9Vδ2 TCR-3: | 193 | CAR 2 of MUC1-2- | 239 |
| intracellular | | 12G12: | | B-IRES-CD14-B | |
| domain −5 | | δ chain | | | |
| Removed PD-1 | 94 | Vγ9Vδ2 TCR-4: | 194 | Construct of | 244 |
| intracellular | | CP.1.15 | | MUC1-5E5-A- | |
| domain −1 | | γ chain | | IRES-BCMA-A | |
| Removed PD-1 | 95 | TCR-4: CP.1.15δ | 195 | CAR 1 of MUC1- | 202 |
| intracellular | | chain | | 5E5-A-IRES- | |
| domain −2 | | | | BCMA-A | |
| Fokl WC | 96 | WT CD3-zeta | 196 | CAR 2 of MUC1- | 245 |
| | | | | 5E5-A-IRES- | |
| | | | | BCMA-A | |
| M Fokl | 97 | Invariant sequence | 197 | Construct of | 246 |
| | | for iNKT α chain | | MUC1-5E5-B- | |
| | | (hVα24-JαQ-TRAC) | | IRES-BCMA-A | |
| M Fokl | 98 | An example for | 198 | CAR 1 of MUC1- | 205 |
| | | iNKT β chain | | 5E5-B-IRES- | |
| | | sequence | | BCMA-A | |
| | | (containing Vβ11): | | | |
| γ chain-1 of | 99 | Invariant sequence | 199 | CAR 2 of MUC1- | 245 |
| Vγ9Vδ2 | | for MAIT α chain | | 5E5-B-IRES- | |
| | | (hAV7S2-AJ33 α | | BCMA-A | |
| | | chain) (version1) | | | |
| VL anti-CD4-2 | 100 | VH anti- CD4-2 | 200 | Construct of | 247 |
| | | | | MUC1-5E5-A- | |
| | | | | IRES-BCMA-B | |
| CAR 1 of MUC1-2- | 210 | CAR 1 of MUC1- | 205 | CAR 1 of MUC1- | 202 |
| A-IRES-CD33-A | | 5E5-B-IRES-CD33- | | 5E5-A-IRES- | |
| | | A | | BCMA-B | |
| CAR 2 of MUC1-2- | 255 | CAR 2 of MUC1- | 255 | CAR 2 of MUC1- | 248 |
| A-IRES-CD33-A | | 5E5-B-IRES-CD33- | | 5E5-A-IRES- | |
| | | A | | BCMA-B | |
| Construct | 261 | Construct ofMUC1- | 257 | Construct of | 249 |
| ofMUC1-2-B- | | 5E5-A-IRES-CD33- | | MUC1-5E5-B- | |
| IRES-CD33-A | | B | | IRES-BCMA-B | |
| CAR 1 of MUC1-2- | 212 | CAR 1 of MUC1- | 202 | CAR 1 of MUC1- | 205 |
| B-IRES-CD33-A | | 5E5-A-IRES-CD33- | | 5E5-B-IRES- | |
| | | B | | BCMA-B | |
| CAR 2 of MUC1-2- | 255 | CAR 2 of MUC1- | 258 | CAR 2 of MUC1- | 245 |
| B-IRES-CD33-A | | 5E5-A-IRES-CD33- | | 5E5-B-IRES- | |
| | | B | | BCMA-B | |
| Construct | 262 | Construct ofMUC1- | 259 | Construct of | 250 |
| ofMUC1-2-A- | | 5E5-B-IRES-CD33- | | MUC1-2-A-IRES- | |
| IRES-CD33-B | | B | | BCMA-A | |
| CAR 1 of MUC1-2- | 210 | CAR 1 of MUC1- | 205 | CAR 1 of MUC1-2- | 210 |
| A-IRES-CD33-B | | 5E5-B-IRES-CD33- | | A-IRES-BCMA-A | |
| | | B | | | |
| CAR 2 of MUC1-2- | 258 | CAR 2 of MUC1- | 258 | CAR 2 of MUC1-2- | 245 |
| A-IRES-CD33-B | | 5E5-B-IRES-CD33- | | A-IRES-BCMA-A | |
| | | B | | | |
| Construct | 263 | Construct ofMUC1- | 260 | Construct of | 251 |
| ofMUC1-2-B- | | 2-A-IRES-CD33-A | | MUC1-2-B-IRES- | |
| IRES-CD33-B | | | | BCMA-A | |
| CAR 1 of MUC1-2- | 212 | Construct ofMUC1- | 253 | CAR 1 of MUC1-2- | 212 |
| B-IRES-CD33-B | | 2-B-IRES-BCMA-B | | B-IRES-BCMA-A | |
| CAR 2 of MUC1-2- | 258 | CAR 1 of MUC1-2- | 212 | CAR 2 of MUC1-2- | 245 |
| B-IRES-CD33-B | | B-IRES-BCMA-B | | B-IRES-BCMA-A | |
| Construct | 254 | MUC1-2-B-IRES- | 248 | Construct of | 252 |
| ofMUC1-5E5-A- | | BCMA-B CAR 2 | | MUC1-2-A-IRES- | |
| IRES-CD33-A | | | | BCMA-B | |
| CAR 1 of MUC1- | 202 | MUC1-5E5-B- | 256 | CAR 1 of MUC1-2- | 210 |
| 5E5-A-IRES- | | IRES-CD33-A | | A-IRES-BCMA-B | |
| CD33-A | | | | | |
| CAR 2 of MUC1- | 255 | CAR 2 of MUC1-2- | 248 | Mcu1-5e5Panko- | 264 |
| 5E5-A-IRES- | | A-IRES-BCMA-B | | enhanced | |
| CD33-A | | | | scFc | |
| Mcu1-Panko5e5- | 265 | hinge and/or | 266 | hinge and/or | 267 |
| enhanced scFc | | transmembrane | | transmembrane | |
| | | domain A | | domain B | |
| hinge and/or | 268 | hinge and/or | 269 | Mcu1-5e5Panko- | 270 |
| transmembrane | | transmembrane | | enhanced | |
| domain C | | domain D | | scFc A 41BB CD2 | |
| | | | | zeta | |
| Mcu1-5e5Panko- | 271 | Mcu1-5e5Panko- | 272 | Mcu1-5e5Panko- | 273 |
| enhanced | | enhanced | | enhanced | |
| scFc B 41BB CD2 | | scFc C 41BB CD2 | | scFc D 41BB CD2 | |
| zeta | | zeta | | zeta | |
| Mcu1-Panko5e5- | 274 | Mcu1-Panko5e5- | 275 | Mcu1-Panko5e5- | 276 |
| enhanced | | enhanced | | enhanced | |
| scFc A 41BB CD2 | | scFc B 41BB CD2 | | scFc C 41BB CD2 | |
| zeta | | zeta | | zeta | |
| Mcu1-Panko5e5- | 277 | GS linker | 278 | Construct of TSHR | 279 |
| enhanced | | | | CAR | |
| scFc D 41BB CD2 | | | | | |
| zeta | | | | | |
| M Fokl-1 | 280 | M Fokl-2 | 281 | Fokl WC | 282 |
| PSCA-CAR ScFv | 356 | CD8sp | 428 | Anti-TSHR-VL | 429 |
| 3*GGGGS linker | 278 | Anti-TSHR-VH | 430 | 4*GGGGS | 431 |
| | | | | bispecific CAR | |
| | | | | linker | |
| humanized-anti | 432 | humanized-anti | 433 | B7-H3 scFv 1 | 434 |
| CD19-VH | | CD19-VL | | | |
| B7-H3 scFv 2 | 435 | B7-H3 scFv 3 | 436 | Anti- CLDN 18.2 | 437 |
| | | | | (175) -VL | |
| Anti- CLDN 18.2 | 438 | CLDN 18.2 (175) | 439 | | |
| (175) -VH | | CAR Binding | | | |
| | | domain | | | |
| tMUC1-CLDN 18.2 | 440 | tMUC1-CLDN 18.2 | 452 | scfv TSHR LH | 466 |
| tanCAR binding | | tanCAR | | | |
| domain | | 5e5/175LH-1 | | | |
| 175/5e5LH | | | | | |
| tMUC1-CLDN 18.2 | 441 | tMUC1-CLDN 18.2 | 453 | scfv TSHR HL | 467 |
| tanCAR binding | | tanCAR | | | |
| domain | | 5e5/175HL-1 | | | |
| 175/5e5HL | | | | | |
| tMUC1-CLDN 18.2 | 442 | tMUC1-CLDN 18.2 | 454 | scfv GUCY2C LH | 468 |
| tanCAR binding | | tanCAR | | | |
| domain | | 5e5/163LH-1 | | | |
| 163/5e5LH | | | | | |
| tMUC1-CLDN 18.2 | 443 | tMUC1-CLDN 18.2 | 455 | scfv GUCY2C HL | 469 |
| tanCAR binding | | tanCAR | | | |
| domain | | 5e5/163HL-1 | | | |
| 163/5e5HL | | | | | |
| tMUC1-CLDN 18.2 | 444 | tMUC1-CLDN 18.2 | 456 | scfv ACPP LH | 470 |
| tanCAR binding | | tanCAR | | | |
| domain | | 175/5e5LH-2 | | | |
| 5e5/175LH | | | | | |
| tMUC1-CLDN 18.2 | 445 | tMUC1-CLDN 18.2 | 457 | scfv ACPP HL | 471 |
| tanCAR binding | | tanCAR | | | |
| domain | | 175/5e5HL-2 | | | |
| 5e5/175HL | | | | | |
| tMUC1-CLDN 18.2 | 446 | tMUC1-CLDN 18.2 | 458 | scfv UPK2 LH (1) | 472 |
| tanCAR binding | | tanCAR | | | |
| domain | | 163/5e5LH-2 | | | |
| 5e5/163LH | | | | | |
| tMUC1-CLDN 18.2 | 447 | tMUC1-CLDN 18.2 | 459 | scfv UPK2 HL (1) | 473 |
| tanCAR binding | | tanCAR | | | |
| domain | | 163/5e5HL-2 | | | |
| 5e5/163HL | | | | | |
| tMUC1-CLDN 18.2 | 448 | tMUC1-CLDN 18.2 | 460 | scfv UPK2 LH (2) | 474 |
| tanCAR | | tanCAR | | | |
| 175/5e5LH-1 | | 5e5/175LH-2 | | | |
| tMUC1-CLDN 18.2 | 449 | tMUC1-CLDN 18.2 | 461 | scfv UPK2 HL (2) | 475 |
| tanCAR | | tanCAR | | | |
| 175/5e5HL-1 | | 5e5/175HL-2 | | | |
| tMUC1-CLDN 18.2 | 450 | tMUC1-CLDN 18.2 | 462 | scfv PSMA LH | 476 |
| tanCAR | | tanCAR | | | |
| 163/5e5LH-1 | | 5e5/163LH-2 | | | |
| tMUC1-CLDN 18.2 | 451 | tMUC1-CLDN 18.2 | 463 | scfv PSMA HL | 477 |
| tanCAR | | tanCAR | | | |
| 163/5e5HL-1 | | 5e5/163HL-2 | | | |
| scfv CD19 HL | 465 | scfv CD19 LH | 464 | anti CXCR5 Scfv | 478 |
| Anti DPEP3 Scfv | 479 | hCD19-CAR (4- | 480 | NFAT6x + minimal | 481 |
| | | 1BB + CD3 zeta)- | | IL12 promoter | |
| | | NATF-IL6-2A-IFNγ | | | |
| IL-6 | 482 | 2A | 483 | IFN-γ aa | 484 |
| aa Sequence | | | | | |
| hCD19-CAR (4- | 485 | IL12 aa | 486 | Hif VHL-interaction | 487 |
| 1BB + CD3 zeta)- | | | | domain: Hif | |
| NATF-IL12-VHL | | | | amino acid 344- | |
| | | | | 417 | |
| GUCY2C-CAR | 488 | scFy 6503 S5D1 | 489 | 163: cldn18.2 | 490 |
| | | | | scfv: CD8-signal | |
| | | | | peptide + cldn18.2VL + | |
| | | | | GS | |
| | | | | linker + cldn18.2VH | |
| 6921: ACPP scFv: | 491 | 2517: tMUC1, | 492 | 2519: tMUC1, | 493 |
| CD8-signal | | cldn18.2 tanCAR | | cldn18.2 tanCAR | |
| peptide + acpp- | | | | | |
| VL + GS | | | | | |
| linker + acpp-VH | | | | | |
| 2521: TSHR, | 494 | 2529: ACPP, | 495 | 2530: ACPP, | 496 |
| tMUC1 tanCAR | | tMUC1 tanCAR | | tMUC1 tanCAR | |
| 2533: ACPP, | 497 | 2534: ACPP, | 498 | scFv target PSMA | 499 |
| tMUC1 tanCAR | | tMUC1 tanCAR | | | |
| scFy target | 500 | scFy target | 501 | scFv target CEA | 502 |
| Mesothelin | | EGFRvIII | | | |
| scFV target | 503 | scFv target IL-13 | 504 | | |
| Glypican-3 | | | | | |

3*GGGGS is (GGGGS)₃ and 4*GGGGS is (GGGGS)₄
CD8sp-- tMUC1-VL--3*GGGGS linker-- tMUC1-VH--4*GGGGS bispecific CAR linker-- humanized-CD19-VH--3*GGGGS linker--humanized-CD19-VL (2501)
CD8sp-- tMUC1-VL--3*GGGGS linker-- tMUC1-VH--4*GGGGS bispecific CAR linker-- humanized-CD19-VL--3*GGGGS linker-- humanized- CD19-VH (2504)
CD8sp-- humanized- CD19-VL--3*GGGGS linker-- humanized- CD19-VH --4*GGGGS bispecific CAR linker-- tMUC1-VL--3*GGGGS linker-- tMUC1-VH
CD8sp-- humanized-CD19-VL--3*GGGGS linker-- humanized- CD19-VH --4*GGGGS bispecific CAR linker-- tMUC1-VH--3*GGGGS linker-- tMUC1-VL

TABLE 6
Example targets of TCR therapy

| | |
|---|---|
| TCL1 | B cell lymphoma |
| NY-ESO-1 | Urinary squamous cell carcinoma/melanoma |
| MAGA1/2/3 | Lung cancer/pancreatic cancer/gastric cancer/breast |
| | cancer |
| MAGE | Lung cancer/pancreatic cancer/gastric cancer/breast |
| A3/A6/A10/A12 | cancer |
| HPV-16 E6/E7 | Cervical cancer/head and neck cancer/anal cancer |
| WT-1 | MDS & AML |
| SSX2 | Hepatocellular carcinoma/melanoma/prostate cancer |
| KRAS | Multiple malignant tumors |
| Neoantigen | Multiple malignant tumors |
| LMP7 | Brain cancer/HIV infection/cervical cancer in situ, |
| | cutaneous basal cell carcinoma or squamous cell |
| | carcinoma, localized prostate cancer or ductal |
| | carcinoma in situ |
| AFP | In theory, CART's maker (film surface) is also |
| | possible (as long as TCR can recognize) |
| HA1 | Multiple malignant tumors |
| P53 | Multiple leukemia + lymphoma |
| GP100 | Multiple malignant tumors |
| LMP1, LMP2 | Melanoma |
| and EBNA1 | |
| MCPyV | EBV |
| CEA | Merkel cell cancer |
| LAGE-1A | Multiple malignant tumors |
| MART-1 | Urinary squamous cell carcinoma/melanoma |

### Example 2. CAR T Cell Expansion and Anti-Tumor Activity in Patients

[0325] Clinical studies were designed to assess the safety and efficacy of infusing autologous T cells modified to express several solid tumor markers specific CAR/4-1BB/CD3-ζ into patients. On the first arm of the studies, patients received solid tumor marker-specific CAR T cells only. The solid tumor marker included TSHR and tMUC1. On the second arm, patients received CAR T cells directed to CD19 and a solid tumor antigen (e.g., TSHR, tMUC1, or GUCY2C). T cells of the patients were obtained, modified, and infused to the patients. T cell responses of patients from the first and second arms were measured and compared using the following protocols, which were approved by the hospitals where the trials were conducted. All patients were provided with written informed consent. Information regarding these patients are provide below in Table 9 (SD: stable disease; PD: progressive disease; PR: partial remission; CR: complete remission; NR: no response).

[0326] PBMCs were obtained from patients. Various lentiviral vectors were generated and then transfected to the T cells, which were further cultured for several days before the co-cultivation assay. More information can be found in Tables 7, 9, and 10 below. Techniques related to cell cultures, construction of cytotoxic T-lymphocyte assay can be found in “Control of large, established tumor xenografts with genetically retargeted human T cells containing CD28 and CD137 domains,” PNAS, Mar. 3, 2009, vol. 106 no. 9, 3360-3365, which is incorporated herein by reference in its entirety.

[0327] Several methods were used to generate CAR T cells. For Patients 001-003, CD3+ cells were obtained from PBMCs and were cultured using X-vivo 15 media containing IL-2. For example, CD3+ T cells can be collected using antibody kits including CD14, CD15, CD16, CD19, CD34, CD36, CD56, CD123, and CD235a to remove undesired cells. The CD3+ T cells were activated using CD3/CD28 Dynabeads and then sampled as well counted before infection. The number of cells to be infected was obtained. The cell number of Group 1 was 6×10⁷, and the cell number of Group 2 was 7×10⁷. The number of corresponding carriers and the volume of the carrier were calculated according to the required carrier MOI (See Table 10). For Patients 004-010, PBMCs were cultured using TEXMACS culture media containing IL-2. CD4 and CD8 magnetic beads were used to sort and select T cells in the PBMCs. The appropriate starting culture amount was selected and Transact activator was used to activate T cells. MACS® GMP T Cell TransAct™ includes a colloidal polymeric nanomatrix covalently attached to humanized recombinant agonists against human CD3 and CD28. Due to the nanomatrix MACS GMP T Cell TransAct can be sterile filtered and excess reagent can be removed by centrifugation and following conventional supernatant replacement or simply by media wash. This reagent is suitable for use in automated culture systems, such as the CliniMACS Prodigy® Instrument The number of corresponding carriers and the volume of the carrier were calculated according to the required carrier MOI (See Table 10). Specifically, for Patients 004-008 and 010, lentiviral vectors containing multiple vectors were mixed with the T cells for 24 hours. The T cells were further washed and cultured for 8 days before being transported to the hospital. For Patient 009, the T cells were divided into four groups, and each group of T cells was mixed with lentiviral vectors, for 24 hours, which contain one or more vectors (See Table 7), and these T cells were washed and cultured for 8 days. These four groups of transfected T cells were mixed and then transported to the hospital.

TABLE 7

| | | | Day6 | | Total | | | |
|---|---|---|---|---|---|---|---|---|
| | | | | CD19 | CAR copy | Ratio to Total | | |
| | | | hCAR +/ | scFv +/ | number per | IL-6/ | | |
| Group | Vector | MOI | CD3 + | CD3 + | ugDNA | IFN-y | IL12 | TSHR |
| 1 | 1 | 50 | 42.64% | 12.37% | 112238.97 | 8.27% | 0.21% | 91.52% |
| | 2 | 10 | | | | | | |
| | 3 | 1 | | | | | | |
| 2 | 1 | 50 | 59.28% | 33.32% | 118925.1 | 17.77% | 0.34% | 81.89% |
| | 2 | 10 | | | | | | |
| | 3 | 1 | | | | | | |
| 3 | 3 | 20 | 19.52% | 18.16% | 19408.75 | 0.00% | 100.00% | 0.00% |
| 4 | 3 | 20 | 26.70% | 26.59% | 17874.89 | 0.00% | 100.00% | 0.00% |

[0328] For fresh cells, after removing the magnetic beads, the transduced cells were centrifuged or replaced with a solution of 95% compound electrolyte and 5% human albumin, loaded into a return bag, and transported at 15-25° C. after sealing. Fresh preparations are returned directly. For cryopreserved cells, the media including 33.75% compound electrolyte solution, 33.75% dextran 40 glucose solution, 25% human blood albumin, and 7.5% dimethyl sulfoxide was used for cryopreservation. The cell suspension was loaded into a cryopreservation bag and then the bag was cooled to −90° C. and transferred to a gas phase liquid nitrogen tank for storage. The reconstitution of the frozen preparations was completed within 30 minutes after resuscitation of the frozen preparations. Peripheral blood mononuclear cells (PBMCs) were obtained from patients by leukapheresis for CAR T cell preparation, and the first day of CAR T infusion was set as study day 0.

[0329] Several patients were given a conditioning treatment for lymphodepletion for CAR T cell infusion. Fludarabine- and cyclophosphamide-based conditioning treatment varied according to the tumor burden in the bone marrow (BM) and peripheral blood (PB). Some patients were administered a long-acting G-CSF for 1-3 days after the conditioning treatment at a dose of about 6 mg each or 100 μg/kg of body weight to boost the patient's neutrophils which are critical to fight off infections. CAR T cells were transfused to the patients. Each day CAR T cells were transported to hospital, washed, counted, checked for viability and then prepared for administration to patients, who were then observed closely for at least 2 hours. Cytokine Release Syndrome (CRS) was graded according to a revised grading system (See Lee D W. et al, Blood 2014; 124:188-95). Other toxicities during and after therapy were assessed according to the National Institutes of Health Common Terminology Criteria for Adverse Events Version 4.0 (http://ctep.cancer.gov/). Therapy responses were assessed by flow cytometry and morphological analysis. When possible, patients were assessed by chimeric gene expression levels.

[0330] Bone Marrow (BM) and peripheral blood (PB) samples after CAR T cell infusion were collected in K2EDTA BD vacutainer tubes. The persistence of CD19 CAR T cells in PB and BM of patients was determined by FACS. Circulating CAR T cell numbers per μl were calculated on the basis of measured absolute CD3+ T lymphocyte counts. Simultaneously, CAR DNA copies were evaluated as another method of determining CAR T cell expansion and persistence. Genomic DNA was extracted using a QIAamp DNA Blood Mini Kit (Qiagen) from cryopreserved PB and BM. CAR DNA copies were assessed by quantitative real-time PCR as described in the supplementary materials. The levels of cytokines IFN-γ, TNF-α, IL-4, IL-6, IL-10, IL-17, etc. in serum and CSF were measured in a multiplex format according to the manufacturer's instructions.

[0331] Genomic DNA was extracted using a QIAamp DNA Blood Mini Kit (Qiagen) from cryopreserved peripheral blood and bone marrow. Quantitative PCR (qPCR) was performed in real-time in triplicates using the ABI 2×TaqMan Universal Master Mix with AmpErase UNG (Applied Biosystems) in a 7500 real-time PCR system (Applied Biosystems). Copy numbers per microgram of genomic DNA were calculated from a standard curve of 10-fold serial dilutions of purified CAR plasmid containing 102-108 copies/μL. Amplification of an internal control gene was used for normalization of DNA quantities. Primers/probes specific for the CAR transgene and an internal control gene were as previously described (see Gökbuget N. et al., Blood 2012; 120:2032-41 and O'Brien S. et al, J Clin Oncol 2013; 31:676-83).

[0332] CAR T cell expansion was observed based on CAR copy numbers of individual CARs and shown in FIGS. 16 and 17. As shown in these figures, CAR T cells expansion in Patients 004 and 005 were significantly higher than those in Patients 002, 003, and 001, indicating that T cells expressing CD19 CAR and/or CD19 CAR and tMUC1 CAR enhanced CAR T cell expansion (Also see Table 10). T cells expressing CD19 CAR, solid tumor CAR (e.g., tMUC1, TSHR, GUCY2C CARs), and double CARs (CD19 CAR and solid tumor CAR) were calculated. For example, T cells expressing CD19 CAR, tMUC1 CAR, and double CARs (CD19 CAR and tMUC1 CAR) were calculated using the following equations:

WBC×CD3%×((tMUC1CAR+CD19CAR−)/CD3),

WBC×CD3%×((tMUC1CAR−CD19CAR+)/CD3), and

WBC×CD3%×((tMUC1CAR+CD19CAR+)/CD3),

wherein WBC is the number of WBC; CD3% is the percentage of CD3 positive cells in WBC; (tMUC1CAR+ CD19CAR−)/CD3 is the percentage of T cells expressing tMUC1 CAR, with no CD19 CAR in CD3 positive cells; (tMUC1CAR-CD19CAR+)/CD3 is the percentage of T cells expressing CD19 CAR, with no tMUC1 CAR in CD3 positive cells; and (tMUC1CAR+CD19CAR+)/CD3 is the percentage of T cells expressing CD19 CAR and tMUC1 CAR in CD3 positive cells. The results are shown in FIGS. 18 and 19. As shown in these figures, CD19 CAR cells significantly increased expansion of tMUC1 CAR T cells, indicating that presence of CD19 CAR enhances increased expansion of tMUC1 CAR T cells. Similar results were observed in Patients 006-010 (See FIGS. 20 and 21). Combination of in vitro results above and in vivo results in the Example below shows that activation of CAR T cells targeting WBC antigens can enhance expansion of CAR T cells targeting solid tumor antigen.

[0333] Patient 008 had undergone thyroidectomy. 28 days after the infusion, the right tumor disappeared, and the size of the left tumor reduced. Examples of PET CT scanning images are shown in FIG. 33. Three months after the infusion, the right tumor did not recur, and the left tumor disappeared. The PET CT images (not shown) showed that there was no tumor recurrence or recurrence in the surgical area. After the scanning signal is enhanced, no abnormal enhancement signal is observed in the above areas. The double neck II and Ill areas showed multiple small lymph nodes with a maximum short diameter of no more than 10 mm. There were no abnormalities in the bilateral submandibular gland morphology and signal. At the same time, the cervical spinal cord morphology and CT signal were normal. It appeared that the patient had achieved at least partial remission (PR). During the treatment, no severe CRS (e.g., no greater than level 2 CRS) was observed in Patient 008. The patient was evaluated to achieve PR.

[0334] Patient 009 was diagnosed with poorly differentiated follicular papillary carcinoma with neuroendocrine carcinoma in the thyroid gland. Patient 009 underwent thyroid double lobe resection and was later examined and confirmed to have multiple lung metastases. Multiple enlarged lymph nodes were found in the mediastinum. 30 days after the infusion of CAR T cells, CT scanning showed that small tumors disappeared, and the size of the two major tumors was reduced by more than 70% (see Table 8). FIG. 34 shows that the major tumor shrunk, and the small tumor disappeared (see lines as well circles in FIG. 34). The patient was evaluated to have achieved PR.

TABLE 8
Reduction of tumor sizes on Patient 009

| | Before | Estimated | Day | Estimated | Day | Estimated | |
|---|---|---|---|---|---|---|---|
| Major | Infusion | Volume | 4 | Volume | 30 | Volume | Reduced |
| tumor | (mm) | (mm³) | (mm) | (mm³) | (mm) | (mm³) | Volume |
| Right lower | 68 × 60 | 128112.00 | 70 × 61 | 136312.63 | 42 × 39 | 33431.58 | 73.90% |
| lobe | | | | | | | |
| Mediastinum | 25 | 65416.67 | 25 | 65416.67 | 15 | 14130.00 | 78.40% |
| and double | | | | | | | |
| hilar | | | | | | | |

[0335] Patient 010 was diagnosed with colorectal cancer and went through 8 cycles chemotherapy as well as other treatments such as surgery before CAR T cell infusion. One month after infusion, PET-CT scanning results show most of the target lesions were significantly reduced (more than 50%), and the comprehensive calculation of tumor reduction was 44.7%. The patient was evaluated to have achieved PR (See arrows in FIG. 35).

[0336] Patient 011 was diagnosed with thyroid cancer. The patient's PBMC was collected and sorted using Prodigy to obtain CD3+ cells, which were then divided into six groups. Each of the six groups of cells was mixed with media containing a corresponding vector, as shown in Table 19. In these six groups of cells, there were no cells expressing both CD19 CAR and TSHR CAR. Subsequently, the six groups of cells were cultured with media without vectors to Day 7 under appropriate conditions, and cell numbers were calculated. A certain number of cells were then obtained from each group and mixed together as shown in Table 19 to obtain a mixed population of cells, which were transported to the hospital for infusion. FIG. 73 shows increases of lymphocytes including CAR T cell, natural killer cells (NK cells), natural killer T cells (NKT cells), and monocytes of Patient 011 in response to the infusion. FIGS. 74 and 75 show the increases of the number of individual CAR T cells and the total number of CAR T cells of Patient 011 in response to the cell infusion. Copy numbers of individual CAR T cell were measured to calculate the number of each type of CAR T cells and the total number of CAR T cells in the blood of Patient 011. The copy numbers and flow cytometry data were used to perform linear regression analysis and to calculate the numbers of individual CAR T cells. The linear regression analysis and expansion of the individual CAR T cells are shown in FIG. 75. These data as well as data from previous patients show that (1) CD19 CAR T cells enhanced the expansion of solid tumor CAR T cells (e.g., TSHR CAR) and (2) CD19 CAR T cells enhanced the expansion of non-CAR T cells (see individual lymphocyte number increases in FIG. 73). Further, these data indicate that this enhancement is triggered by activation of CD19 CAR and mediated by the immune cells in the patients' body, for example, the DCs. Thus, CAR T cells binding a WBC antigen (e.g., CD19 and BCMA) can also be used to enhance other T cell-based therapies (e.g., NK, TCR and TIL). For example, CD19 CAR T cells can be administered to patients combining with NK and/or T cells expressing manipulated TCR or TILs, and activation of CD19 CAR T cells can enhance expansion of these lymphocytes in the patients. FIG. 76 shows cytokine release of Patient 011 in response to cell infusion.

TABLE 19
CAR T cells and vectors used for Patient 011.

| | | | | | Infusion | % in |
|---|---|---|---|---|---|---|
| | | | | | CAR- | infused |
| Cell types | Group | Vectors | MOI | CAR % | T/KG | cells |
| TSHR | 1 | TSHR scfv-41BB-CD3Z | 36.64% | 36.64% | 36.64% | 36.64% |
| CAR-T | 2 | TSHR scfv-41BB-CD3Z | 39.04% | 39.04% | 39.04% | 39.04% |
| | 3 | TSHR scfv-41BB-CD3Z | 15.52% | 15.52% | 15.52% | 15.52% |
| CD19 | 4 | CD19 scfv-41BB-CD3Z- | 7.22% | 7.22% | 7.22% | 7.22% |
| CAR-T | | NFAT-IFNg | | | | |
| | 5 | CD19 scfv-41BB-CD3Z- | 0.82% | 0.82% | 0.82% | 0.82% |
| | | NFAT-IL6 | | | | |
| | 6 | CD19 scfv-41BB-NFAT- | 0.82% | 0.82% | 0.82% | 0.82% |
| | | IL12-VHL | | | | |

| | | | |
|---|---|---|---|
| Total for infusion | 40.26% | 1.25 × 10⁷ | 100% |

[0337] The combination of in vitro results above and in vivo results in this Example shows that activation of CAR T cells targeting WBC antigens can enhance anti-tumor activity of CAR T cells targeting solid tumor antigen.

[0338] FIG. 72 shows PDL1 expression of monocytes in Patient 009 on Day 0, Day 1, and Day 4. Monocytes were obtained from several patients, before and after infusion of the mixed CAR T cells (CD19CAR+tMuc1 CAR, CD19CAR+GUCY2C CAR, and CD19CAR+ TSHR CAR) into the patients. The monocytes were analyzed using flow cytometry to measure the expression of markers such as PDL1. The flow cytometry results showed that the PDL1 expression was up-regulated in monocytes of patients after infusion of mixed CAR T cells. An example is shown in FIG. 72. The upregulation of PDL1 in monocytes showed the activation of monocytes, further proving the immune system of the patients was activated.

TABLE 9
clinical trial data

| | | | CAR T cell | | |
|---|---|---|---|---|---|
| Patient's | | Infusion | types Percentage | CSR > | |
| ID | Cancer | CART/kg | before infusion | 2 | Efficacy |
| 001 | Breast | 1 × 10⁵ | N/A | No | PD (One |
| | cancer | 1.24 × 10⁶ | | | Month) |
| | | 0.966 × 10⁷ | | | |
| 002 | Pancreatic | 1.28 × 10⁶ | N/A | No | NR (One |
| | cancer | 1.29 × 10⁷ | | | Month) |
| 003 | Thyroid | 1.1 × 10⁶ | N/A | No | NR (One |
| | cancer | | | | Month) |
| 004 | Pancreatic | 1.18 × 10⁶ | MUC1 CAR T cells/ | No | PD (One |
| | cancer | | CD3+ = 50% | | Month) |
| | | | CD19 CAR T cells/ | | |
| | | | CD3+ = 15% | | |
| | | | MUC1 & CD19 CAR T | | |
| | | | cells/CD3+ = 6.8% | | |
| 005 | Breast | 1.03 × 10⁶ | N/A | No | SD (One |
| | cancer | | | | Month) |
| 006 | Breast | 0.11 × 10⁶ | N/A | No | SD (One |
| | cancer | | | | Month) |
| 007 | Breast | 1.52 × 10⁶ | N/A | No | SD (One |
| | cancer | | | | Month) |
| 008 | Thyroid | 2.08 × 10⁹ | TSHR + CD19 CAR T | No | PR (See |
| | cancer | | cells/CD3+ = 33.04% | | FIG. 33) |
| | | | CD19 CAR T | | |
| | | | cells/CD3+ = 21.96% | | |
| 009 | Thyroid | 1.36 × 10⁹ | TSHR + CD19 CAR T | No | PR (See |
| | cancer | | cells/CD3+ = 42.64% | | FIG. 34) |
| | | | CD19 CAR T | | |
| | | | cells/CD3+ = 12.37% | | |
| 010 | Colorectal | 3.78 × 10⁸ | GUCY2C + CD19 CAR T | No | PR (See |
| | cancer | | cells/CD3+ = 15.55% | | FIG. 35) |
| 011 | Thyroid | 1.25 × 10⁷ | CAR/CD3+ = 40.26% | No | N/A |
| | cancer | | CD19 CAR/CD3+ = 2.25% | | |
| | | | TSHR | | |
| | | | CAR/CD3+ = 38.1% | | |

TABLE 10
cell manufacture for clinical trials

| Patient's | | Infusion | |
|---|---|---|---|
| ID | Vectors and MOI | Methods | Pre-treatment |
| 001 | Vector 1: MUC1-CAR (scFv of the CAR is | Fresh (first | cyclophosphamide |
| | SEQ ID NO: 70): 30: 1 | infusion) and | 1.5 grams/m2 in −3 |
| | | Cryopreserved | days |
| | | (second | |
| | | infusion) cells | |
| 002 | Vector 1: MUC1-CAR (scFv of the CAR is | Fresh cells | No |
| | SEQ ID NO: 70): 30: 1 | | |
| 003 | Vector 2: TSHR-CAR (scFv of the CAR is | Fresh cells | FC regimen at −5 to −3 days |
| | SEQ ID NO: 8): 100: 1 | | (cyclophosphamide 500 mg/m2, |
| | | | fludarabine 30 mg/m2) |
| 004 | Vector 1: MUC1-CAR (scFv of the CAR is | Fresh cells | FC regimen at −5 to −3 days |
| | SEQ ID NO: 70): 19: 1 | | (cyclophosphamide 500 mg/m2, |
| | Vector 2: hCD19-CAR (scFv of the CAR is | | fludarabine 30 mg/m2) |
| | SEQ ID 5): 5: 1 | | |
| 005 | Vector 1: MUC1-CAR /Dominant Negative | Fresh cells | No |
| | PD-1(scFv of the CAR is SE Q ID NO: 70 | | |
| | and 89): 18: 1 | | |
| | Vector 2: hCD19-CAR (scFv of the CAR is | | |
| | SEQ ID 5): 5: 1 | | |
| 006 | Vector 1: MUC1-CAR (scFv of the CAR is | Fresh cells | cyclophosphamide |
| | SEQ ID NO: 70): 19: 1 | | 1.5 grams/m2 in −3 |
| | Vector 2: hCD19-CAR (scFv of the CAR is | | days |
| | SEQ ID 5): 5: 1 | | |
| 007 | Vector 1: MUC1-CAR (scFv of the CAR is | Cryopreserved | cyclophosphamide |
| | SEQ ID NO: 70): 19: 1 | cells | 1.5 grams/m2 in −3 |
| | Vector 2: hCD19-CAR (scFv of the CAR is | | days |
| | SEQ ID 5): 5: 1 | | |
| 008 | Vector 1: TSHR-CAR (CAR: SEQ ID NO: | Fresh cells | FC regimen at −5 to −3 days |
| | 279, scFv of the CAR: SEQ ID NO: 8): | | (cyclophosphamide 500 mg/m2, |
| | 19: 1 (MOI); and Vector 2: hCD19-CAR- | | fludarabine 30 mg/m2) |
| | NATF-IL6-2A-IFNγ (Vector SEQ ID NO: | | |
| | 480, scFv of CD19 CAR: SEQ ID 5, | | |
| | 6xNFAT: SEQ ID: 481, aa of IL6: SEQ ID | | |
| | NO: 482, 2A is SEQ ID NO: 483, and aa of | | |
| | IFN-γ: SEQ ID NO: 484 (See the construct | | |
| | of Embodiment 1 of FIG. 63)): 5: 1 (MOI) | | |
| 009 | Vector 1: TSHR-CAR (CAR: SEQ ID NO: | Fresh cells | FC regimen at −5 to −3 days |
| | 279, scFv of the CAR: SEQ ID NO: 8): (See | | (cyclophosphamide 600 mg, |
| | MOI in Table 7); Vector 2: hCD19-CAR- | | fludarabine 50 mg) |
| | NATF-IL6-2A-IFNγ (Vector SEQ ID NO: | | |
| | 480, scFv of CD19 CAR: SEQ ID 5, | | |
| | 6xNFAT: SEQ ID: 481, aa of IL6: SEQ ID | | |
| | NO: 482, 2A is SEQ ID NO: 483, and aa of | | |
| | IFN-γ: SEQ ID NO: 484 (See the construct | | |
| | in Embodiment 1 of FIG. 63)) (See MOI in | | |
| | Table 7); and Vector 3: hCD19-CAR-NATF- | | |
| | IL12-VHL (Vector SEQ ID NO: 485, scFv of | | |
| | CD19 CAR: SEQ ID 5, 6xNFAT: SEQ ID: | | |
| | 481, aa of IL12: SEQ ID NO: 486, VHL: | | |
| | SEQ ID NO: 487 (See the construct of | | |
| | Embodiment 3 of FIG. 63) (See MOI in | | |
| | Table 7). | | |
| 010 | Vector 4: GUCY2C-CAR (CAR: SEQ ID | Fresh cells | FC regimen at −2 days |
| | NO: 488, scFv of the CAR: SEQ ID NO: | | (cyclophosphamide 500 mg/m2, |
| | 11): 50: 1(MOI); and Vector 2: hCD19-CAR- | | fludarabine 30 mg/m2) |
| | NATF-IL6-2A-IFNγ (Vector SEQ ID NO: | | |
| | 480, scFv of CD19 CAR: SEQ ID 5, | | |
| | 6xNFAT: SEQ ID: 481, aa of IL6: SEQ ID | | |
| | NO: 482, 2A is SEQ ID NO: 483, and aa of | | |
| | IFN-γ: SEQ ID NO: 484 (See the construct | | |
| | of Embodiment 1 of FIG. 63)): 10: 1 (MOI) | | |
| 011 | Vector 1: TSHR-CAR (CAR: SEQ ID NO: | Fresh cells | FC regimen at −2 days |
| | 279, scFv of the CAR: SEQ ID NO: 8) (See | | (cyclophosphamide 500 mg/m2, |
| | MOI in Table 19); Vector 3: hCD19-CAR- | | fludarabine 30 mg/m2) |
| | NATF-IL12-VHL (Vector SEQ ID NO: 485, | | |
| | scFv of CD19 CAR: SEQ ID 5, 6xNFAT: | | |
| | SEQ ID: 481, aa of IL12: SEQ ID NO: 486, | | |
| | VHL: SEQ ID NO: 487 (See the construct of | | |
| | Embodiment 3 of FIG. 63) (See MOI in | | |
| | Table 19); and Vector 4: hCD19-CAR- | | |
| | NATF-IFNγ (Vector SEQ ID NO: 480, scFv | | |
| | of CD19 CAR: SEQ ID 5, 6xNFAT: SEQ ID: | | |
| | 481, and aa of IFN-γ: SEQ ID NO: 484 (See | | |
| | the construct in Embodiment 5 of FIG. 63)) | | |
| | (See MOI in Table 19); and Vector 5: | | |
| | hCD19-CAR-NATF-IL6 (Vector SEQ ID NO: | | |
| | 480, scFv of CD19 CAR: SEQ ID 5, | | |
| | 6xNFAT: SEQ ID: 481, and aa of IL6: SEQ | | |
| | ID NO: 482 (See the construct in | | |
| | Embodiment 4 of FIG. 63)) (See MOI in | | |
| | Table 19); | | |

### Example 3. Activation of Coupled/Mixed T Cells

[0339] Mixed CAR T cells (Coupled CAR T cells) were divided into three Groups for assays related to activation: CD19 CAR and tMUC1 CAR (Group 1), anti-CD19 CAR and ACPP CAR (Group 2), and CD19 and CLDN18.2 CAR (Group 3). Peripheral blood of healthy volunteers was collected. CD3+ T cells were sorted using Pan T kits, and CD3/CD28 Dynabeads were added at a 1:1 ratio. CD3+ T cells were then transfected with lentivirus. The lentivirus and the Dynabeads were removed, and fresh media were added. CAR ratios and cell phenotype were determined. Expression of CAR in these three groups of cells was measured. CD19 CAR T cells, tMUC1 CAR T cells, and target cells were selected and mixed for 24 hours or 48 hours. Expression of various markers in corresponding cells was measured. 20×10⁴ CAR T cells and 20×10⁴ substrate cells were co-cultured for 24 hrs. The expression of molecules such as hCAR (humanized scFv), mCAR (murine scFv), CD25, and CD137 in T cells was measured by flow cytometry. For example, CD25 and CD137 positive staining indicated that T cells were activated. Amounts of cytokines released from various T cells were measured in response to the antigen activation, and background of the corresponding T cells was subtracted.

[0340] Tables 11, 12, and 13 provide information for CAR T cells and corresponding substrate cells of Group 1, Group 2, and Group 3, respectively. For example, CAR 1204 is a human-derived CAR, which can be labeled with human CAR antibody and CD137 antibody. CAR 2407 (tMUC1 CAR) is a murine CAR that can be labeled for activation with a murine CAR antibody and a CD137 antibody. Cells expressing CAR 1204 (CD19 CAR T cells) can be activated by K562 cells expressing CD19, resulting in up-regulated CD137 expression. CAR 1204 cells, CAR 2407 cells, and K562 cells expressing CD19 were co-cultured to induce CD19 CAR T cell activation. The binding domains of CD19 CAR and tMUC1 CAR include SEQ ID NOs: 5 and 70, respectively. The activation of 2407 CAR T cells was detected and measured based on the expression of CD137, which evidence the indirect activation of CD19 CAR T cells.

TABLE 11
CAR T cells and substrate cells used in Group 1

| | CD19 CAR T Cells & tMUC1 CAR T Cells | | |
|---|---|---|---|
| Coupled CAR T Cells | | Substrate | |
| CART cell ID | CAR | cell ID | Notes |
| 1234 | CD19 CAR | K19 | CD19 positive Cell |
| 2407 | tMUC1 CAR | MCF-17 | 5E5 (tMUC1) |
| | | | positive cell |

[0341] FIG. 36 shows results of flow cytometry analysis of CD19 CAR T cells co-cultured with tMUC1 CAR T cells in the presence or absence of K19 cells.

[0342] Peripheral blood of healthy volunteers was collected on Day 0. CD3+ T cells were sorted using Pan T kits, and CD3/CD28 Dynabeads were added to the collected CD3+ T cells at a 1:1 ratio. On Day 1, the activated CD3+ T cells were divided into two subgroups, each transfected with lentivirus encoding a single CAR (CD19 CAR or tMUC1 CAR). Thus, two subgroups of CAR T cells were obtained: a subgroup of CAR T cells expressing CD19 CAR, and another subgroup of CAR T cells expressing tMUC1 CAR. The binding domains of CD19 CAR and tMUC1 CAR include SEQ ID NOs: 5 and 70, respectively. On Day 2, the lentivirus and the Dynabeads were removed, and fresh media were added. On Day 7, CAR T cells and target cells were co-cultured for 24 hours, and various assays were performed on Day 8. Subgroups of cells can be mixed and co-cultured with corresponding substrate cells (see FIGS. 36-60).

[0343] FIG. 36 provides histograms showing CD137 expression in various cell cultures. In each cell culture, CAR T cells were cultured with the corresponding substrate cells, and CD137 expression was measured using flow cytometry (Gate mCAR+: tMUC1CAR). The cell cultures include (1) tMUC1CAR T cells and K19, (2) tMUC1CAR T cells, K19, and PBMC, (3) tMUC1CAR T cells, CD19CAR T cells and K19, (4) tMUC1CAR CAR T cells, CD19 CAR T cells, K19, and PBMC. The CD8+ T cells were also counted. As shown in FIG. 36, the activation of tMUC1CAR T cells (i.e., expression of CD137) was observed in the presence of K19, and the activation level of MUC1 CAR T cells was higher than that of the single group. Further, the level of activation was higher after adding PBMC (e.g., MFI of CD137). These results indicate that the activation of CD19 CAR T cells by K19 activates tMUC1 CAR T cells in the absence of the antigen that tMUC1 CAR binds (tMUC1), and this activation is enhanced by the presence of PBMC. The experimental results are based on the expression ratio as the main basis for measuring the difference (left). When the proportional difference is not significant, the expression intensity (MFI) is used as a measure of the difference (right).

[0344] FIG. 37 shows the activation of PBMC and monocytes in the cell cultures described in FIG. 36. Flow cytometry assays of monocyte (CD14+) and activated monocyte (CD14+CD80+) were performed in PBMC, and FIG. 37 shows a histogram of statistical analysis of the assays. h19CAR is a humanized CD19CAR, and the cell cultures include (1) PBMC alone, (2) PBMC+K19, (3) PBMC and CD19CAR T cells, (4) PBMC, K19, and CD19CAR T cells. As shown in FIG. 37, the last group of PBMCs showed activation (CD80 expression). These results show that activation of the CAR T cells is capable of activating PBMC including monocytes. Combination of the results shown in FIGS. 36 and 37 indicates that activation of CD19 CAR T cells by K19 activates tMUC1CAR T cells in the absence of the antigen that tMUC1 CAR binds, and this activation can be mediated at least partially through PBMC.

[0345] FIG. 38 provides a histogram showing IFNγ release by tMUC1 CAR T cells and CD19 CAR T cells. Various cells were cultured on Day 7, and flow cytometry assays were performed on Day 8. The graph is a statistical analysis of the convective graph. In these assays, NT (non-transfected T cells) was used as a control. Compared with the control, cell cultures including CD19 CAR T cells and tMUC1 CAR T cells showed an increase of intracellular IFNγ in CD19 CAR T and MUC1 CAR T cells, indicating that CD19CAR T cells activated by K19 released IFNγ and activated tMUC1CAR T cells to release IFNγ. The PBMC group up-regulated the ratio of IFNγ released by CD19CAR T cells and by tMUC1CAR T cells. IFNγ cumulated in the coupled CAR group was more than that in the cells expressing a single CAR (CD19 CAR or tMUC1 CAR), and the addition of PBMC upregulated this effect. The mCAR-group is not all CD19 CAR positive cells, and the statistical value is relative. The results show that activation of CD19 CAR T cells induced tMUC1 CAR T cells to express more IFNγ and thus release IFNγ in the absence of the antigen that tMUC1 CAR binds (tMUC1).

[0346] FIG. 39 provides a histogram showing GZMB release by tMUC1 CAR T cells and CD19 CAR T cells. Various cells were cultured on Day 7, and flow cytometry assays were performed on Day 8. Flow cytometry assays showed GZMB release by the activated CD19 CAR T cells and MUC1 CAR T cells. The statistical analysis of the convective graphs (proportional comparison MFI) indicates that the activation of CD19 CAR T cells can cause MUC1 CAR T cells to release GZMB, and such release was enhanced in the presence of PBMC. The mCAR-group is not all CD19 CAR positive cells, and the statistical value is relative. These results show that activation of CD19 CAR T cells induced MUC1 CAR T cells to release intracellular GZMB.

[0347] FIGS. 40 and 41 show proliferation of MUC1 CAR T cells in various embodiments. CFSE reactions were performed and used to indicate levels of cell proliferation. Various cells were cultured on Day 7, and flow cytometry assays were performed on Day 8. As shown on FIG. 40, the first row is the experimental group of coupled CAR T cells co-cultured with two substrate cells, and the second row is the control group of MUC1 CAR T cells co-cultured with two substrate cells. As shown in the third and fourth columns of the first and second rows, activation of CD19 CAR T cells with K19 induces the proliferation of MUC1 CAR T cells. The fifth and sixth columns show that MCF-7 activates and incudes the proliferation of MUC1CAR T cells. FIG. 41 shows counting results from the flow cytometry shown in FIG. 40. The volume calibration was performed, tMUC1 CAR cell population was gated, and the number of cells of each group of tMUC1 CAR was statistically analyzed. As shown in FIG. 41, the number of cells in the group including CD19 CAR T cells and tMUC1CAR T cells was higher than that in the control group, and the proliferation of the group including CD19 CAR T cells and tMUC1 CAR T cells in the presence of PBMC was the highest. The results show that activation of CD19 CAR T cells can enhance the proliferation of MUC1 CAR T cells, which can be enhanced and/or medicated through PBMC.

[0348] FIG. 12 shows the proliferation CD19 CART cells in various embodiments. CFSE reactions were performed and used to indicate levels of cell proliferation. Various cells were cultured on Day 7, and flow cytometry assays were performed on Day 8. The groups of cells comprising CD19 CAR T cells, tMUC1 CAR T cells, MCF-7 in the presence or absence of PBMC showed the proliferation of CD19 CAR T cells. These results show that activation of tMUC1 CAR T cells can enhance the proliferation of CD19 CAR T cells, which may be enhanced and/or medicated through PBMC. The combination of the results shown in FIGS. 40-42 indicates that the mixture of CD19 CAR T cells and tMUC1 CAR T cells may form a positive circle through PBMC such that activation of CD19 CAR T cells or tMUC1 CAR T cells may further activate each other to enhance the proliferation of CD19 CAR T cells and tMUC1 CAR T cells and/or the release of cytokines by CD19 CAR T cells and tMUC1 CAR T cells, which may be mediated and/or enhanced by PBMC (See FIG. 62). These results can also explain the reason that tMUC1 CAR T cells expanded more in subjects infused with a population of cells comprising coupled CAR T cells (e.g., Patients 001-003) than subjects infused with a population of cells including a single type of CAR T cells (e.g., Patient 004-010). Coupled CAR T cells (e.g., CD19 CAR T cells and tMUC1 CAR T cells) can contribute to this enhanced cell expansion.

[0349] FIG. 43 shows cytokine release in embodiments. Various cells were cultured on Day 7, and flow cytometry assays were performed on Day 8. As shown in FIG. 43, IFN-γ release in the control group is limited. The coupled CAR group and single CAR group are labeled using the solid line and the dotted line, respectively. The levels of IFN-γ released were similar in the absence of PBMC. When PBMC was added, the levels of IFN-γ released increased. 1L6 was mainly secreted by PBMC, and the released amount in the activated system is increased. Here, the amount of tMUC1CAR cytokine released was relatively low.

TABLE 12
CAR T cells and substrate cells used in Group 2

| | CD19 CAR T cells & ACPP CAR cells | | |
|---|---|---|---|
| Coupled CAR T cells | | Substrate | |
| CART Cell ID | CAR | Cell | Notes |
| 1234 | CD19 CAR | Nalm | CD19 positive Cell |
| 6503 | ACPP CAR | PC3-ACPP | ACPP positive cell |

[0350] FIG. 44 shows other histograms of CD137 expression in various cell cultures. Peripheral blood of healthy volunteers was collected on Day 0. CD3+ T cells were sorted and collected using Pan T kits, and CD3/CD28 Dynabeads were added at a 1:1 ratio to the collected CD3+ T cells. Day 1, CD3+ T cells were transfected with lentivirus encoding CD19 CAR and ACPP CAR, respectively. The binding domains of CD19 CAR and ACPP CAR include SEQ ID NOs: 5 and 489, respectively. On Day 2, the lentivirus and the Dynabeads were removed, and fresh media were added. On Day 7, CAR T cells and target cells were co-cultured for 24 hours and various assays were performed on Day 8. Flow cytometry assays were performed, and the results show expression of CD19 CAR and ACPP CAR T cells. As shown in FIG. 44, the activation of the ACPP CAR T cells was higher, and the activation was increased in presence of PBMC. These results show activation of CD19 CAR T cells by nalm6 can activate ACPP CAR T cells, and this effect is enhanced by PBMC.

[0351] FIG. 45 shows flow cytometry assays of activation analysis. CD45RO and CD62L can be used to divide CART cells into four states. Nalm6 activated expression of CD45RO and CD62L on CD19 CAR T cells, and the proportion of effector cells in ACPP CAR T cells increased. These results show that the activation of CD19 CAR T cells induced ACPP CAR T cells to a functional state, which acted as the pre-activation of ACPP CAR T cells.

[0352] FIG. 46 shows the activation of PBMC and monocyte in the cell cultures described in FIG. 44. Flow cytometry assays showed monocyte (CD14+) and activated monocyte (CD14+&CD80+) in PBMC. h19CAR is a humanized CD19CAR, and the groups include (1) PBMC alone, (2) PBMC and K19, (3) PBMC and CD19CAR T cells, (4) PBMC and K19 and CD19CAR T cells. These results indicate that activation the CAR T cells is capable of activating PBMC.

[0353] FIG. 47 shows that activation of CD19 CAR T cells induces ACPP CAR T cells to release intracellular IFNγ. Similar to above, various cells were cultured on Day 7, and flow cytometry assays were performed on Day 8. When both CAR T cells were present and there was PBMC in the system, ACPP CAR T cells also showed enhanced IFNγ release.

[0354] FIGS. 48 and 49 show cytokine release after cells were co-cultured for 24 hrs in cell cultures. There are limited amounts of TNF-α, IFN-γ, GZMB released in the control group. The coupled CAR group (CD19 CAR T cells and ACPP CAR T cells) and single CAR group (CD19 CAR T cells or ACPP CAR T cells) were labeled with solid line and dotted line, respectively. The levels of TNF-α, IFN-γ, GZMB released are similar in the absence of PBMC. When PBMC was added, the amount of TNF-α, IFN-γ, GZMB released increased. IL6 was mainly secreted by PBMC, and the amount of released cytokines was enhanced in the coupled CAR group in the presence of PBMC.

TABLE 13
CAR T cells and substrate cells used in Group 3

| | CD19 CAR T cells & CLDN 18.2 CAR T cells | | |
|---|---|---|---|
| Coupled CAR T cells | | Substrate | |
| CART Cell ID | CAR | Cell | Note |
| 1234 | CD19 CAR | K19 | CD19 positive Cell |
| 6503 | CLDN 18.2 | KATO3 | CLDN 18.2 |
| | CAR | | positive cell |

[0355] FIG. 50 provides additional histograms showing CD137 expression in various cell cultures. Peripheral blood of healthy volunteers was collected on Day 0. CD3+ T cells were sorted using Pan T kits, and CD3/CD28 Dynabeads were added at a 1:1 ratio. On Day 1, CD3+ T cells were transfected with lentivirus encoding CD19 CAR and CLDN 18.2 CAR, respectively. The binding domains of CD19 CAR and CLDN 18.2 CAR include SEQ ID NOs: 5 and 437, respectively. On Day 2, the lentivirus and the Dynabeads were removed, and fresh media were added. On Day 7, CAR T cells and target cells were cocultured for 24 or 48 hours and various assays were performed on Day 8. As shown in FIG. 50, the activation of the CLDN18.2 CAR T cells was higher, and the activation was enhanced in the presence of PBMC. These results show that activation of CD19 CAR T cells by K19 can indirectly activate CLDN18.2 CAR T cells, and this effect is enhanced by PBMC.

[0356] FIG. 51 shows results of flow cytometry analysis of various CAR T cells cocultured with KATO3+ cells for 48 hours. It can be seen from the histograms that the level of activation of CD19 CAR T cells in the coupled CAR T group (CD19 CAR T cells and CLDN 18.2 CAR) was higher than in the single CAR T group (CD19 CAR T cells or CLDN 18.2 CAR) in the presence of KATO3+ cells. The level of activation of CD19 CAR T cells was higher after being activated in the presence of PBMC (e.g., the ratio of CD25 and CD137), indicating that CD19 CAR T cells can be activated by activation of CLDN18.2 CAR T cells by KATO3+ cells, which was enhanced by PBMC. CD40L is mainly expressed by CD4 T cells (interacting with CD40L+ cells in PBMC, such as B cells, activated monocytes, DC). The results show that activation of CLDN18.2 CAR T cells by KATO3+ cells can up-regulate the expression of CD40L of CD19 CAR T cells, which can activate B cells and mononuclear cells. This effect was enhanced by PBMC.

[0357] FIG. 52 shows the activation of PBMC and monocyte in the systems described in FIG. 50. h19CAR is a humanized CD19 CAR, and the groups include (1) PBMC alone, (2) PBMC and K19, (3) PBMC and CD19 CAR T cells, (4) PBMC, K19, and CD19 CAR T cells. As shown in FIG. 52, last column of PBMCs shows activation, indicating that activation of the CAR T cells is capable of activating PBMC.

[0358] FIGS. 53 and 54 show that activation of CLDN18.2 CAR T cells induces CD19 CAR T cells to release intracellular IFNγ. Similar to those in FIGS. 39 and 39, the amount of IFNγ released in the coupled CAR T cell group (CD19 CAR T cells and CLDN 18.2 CAR) was more than that of the single type CAR T cell group (CD19 CAR T cells or CLDN 18.2 CAR), and the addition of PBMC can upregulate this effect.

[0359] FIG. 55 shows killing assays for various cell cultures. The starting amount of both substrate cells is 2.0×10⁵/600 ul or 3.33×10⁵/ml. FIG. 55 shows the cell density of the substrate cells after three days of killing. PBMC helped the killing of the substrate cells, and the coupled CAR T cell group (CD19 CAR T cells and CLDN 18.2 CAR) enhanced the killing effect of CD19 CAR T cells alone or CLDN18.2 CAR T cells alone. In the presence of PBMC, the coupled CAR T cells had better killing effects, demonstrating that the activated CAR T cells can activate PBMC and further activate another type of CAR T cells in the coupled CAR T cell group to release cytokines and enhance the efficacy when a type of CAR T cells in a coupled CAR T system is activated.

[0360] FIG. 56 shows the proliferation of CLDN18.2 CAR T cells. Various cells were cultured on Day 7, and flow cytometry assays were performed on Day 8. Further, CFSE reaction was measured to evaluate levels of proliferation. As shown in FIG. 56, the first row is the experimental group comprising coupled CAR co-cultured with two substrate cells, and the second row is the control group comprising CLDN18.2CAR co-cultured with two substrate cells. FIG. 56 shows that the activation of CD19 CAR T cells with K19 can induce the proliferation of CLDN18.2CAR T cells. KATO3 cells can be effectively activated by CLDN18.2 CAR T cells and then were proliferated. The presence of PBMC can further enhance proliferation. The results demonstrate that CD19 CAR is efficiently activated by K19 in the coupled CAR group and activated CD19 CART can activate CLDN18.2 CAR T cells to promote proliferation CLDN18.2 cells, which can be further enhanced by the PBMC.

[0361] FIG. 57 shows proliferation of CD19 CAR T cells. Various cells were cultured on Day 7, and flow cytometry assays were performed on Day 8. Further, CFSE reaction was measured to evaluate the levels of proliferation. Further, CFSE reaction was measured to evaluate the levels of proliferation. As shown on FIG. 57, the first row is the experimental group comprising couple CAR T cells co-cultured with two substrate cells, and the second row comprising the control group CD19 CAR T cells co-cultured with two substrate cells. FIG. 57 shows that activation of CLDN18.2 CAR T cells with KATO3+ cells can induce the proliferation of CD19 CAR T cells. The fifth and sixth columns show that PBMC can further enhance proliferation of CD19 CAR T cells. The results demonstrate that CLDN18.2 CAR T cells were activated by KATO3+ cells in the coupled CAR group and activated CLDN18.2 CAR T cells can activate CD19 CAR T cells to promote the proliferation of CD19 CAR T cells, which can be further enhanced by PBMC.

[0362] FIGS. 58-60 show cytokine release in various cell cultures. Various cells were cultured on Day 7, and flow cytometry assays were performed on Day 8. As shown, limited amounts of IL12, IFNγ and GZMB were released in the control group. The coupled CAR T cell group and single CAR T cell group were labeled with solid line and dotted line, respectively. The amount of IL12, IFNγ and GZMB released is similar in the absence of PBMC. When PBMC was added, the amount of IL12, IFNγ and GZMB released increased.

TABLE 20
CAR T cells and substrate cells used in Group 4

| | CD19 CAR T cells & ACPP CAR cells | | |
|---|---|---|---|
| Coupled CAR T cells | | Substrate | |
| CART Cell ID | CAR | Cell | Notes |
| 6404 | BCMA CAR | 8226 | BCMA positive Cell |
| 6701 | GUCY2C CAR | T84 | GUCY2C |
| | | | positive cell |

[0363] FIG. 84 shows other histograms of CD137 expression in various cell cultures. Peripheral blood of healthy volunteers was collected on Day 0. CD3+ T cells were sorted and collected using Pan T kits, and CD3/CD28 Dynabeads were added at a 1:1 ratio to the collected CD3+ T cells. On Day 1, CD3+ T cells were transfected with lentivirus encoding BCMA CAR and GUCY2C CAR, respectively. The binding domains of CD19 CAR and ACPP CAR include SEQ ID NOs: 60 and 488, respectively. On Day 2, the lentivirus and the Dynabeads were removed, and fresh media were added. On Day 7, CAR T cells and target cells (e.g., 8226) were co-cultured for 24 hours and various assays were performed on Day 8. Flow cytometry assays were performed, and the results show expression of CD19 CAR and ACPP CAR T cells. As shown in FIG. 84, the activation of the GUCY2C CAR T cells was higher, and the activation was increased in the presence of PBMC. These results show activation of BCMA CAR T cells by 8226 can activate GUCY2C CAR T cells, and this effect is enhanced by PBMC. Since PBMC includes B cells and plasma cells that include BCMA, PBMC can activate BCMA CAR T cells. The activation of BCMA CAR T cells by PMBC is enhanced by GUCY2C CAR T cells.

[0364] FIG. 85 shows the proliferation of GUCY2C CAR T cells. Various cells were cultured on Day 7, and flow cytometry assays were performed on Day 8. Further, CFSE reaction was measured to evaluate levels of proliferation. PMBC includes B cells and plasma cells, which include BCMA. As shown in FIG. 85, the activation of BCMA CAR T cells with PMBC can induce the proliferation of GUCY2C CAR T cells.

[0365] FIG. 86 shows cytokine release after cells were co-cultured for 24 hrs in cell cultures. There are limited amounts of IL-6, IFN-γ, GZMB released in the control group. The levels of IL-6 and GZMB released are similar in the absence of PBMC. When PBMC was added, the amount of IL-6 and GZMB released increased. The amount of released cytokines was enhanced in the coupled CAR group in the presence of PBMC.

[0366] NY-ESO-1 transduced T cells (NYESO-1 TCRTS or 8302) and AFP transduced T cells (AFP TCRTS or DW105) were mixed with CD19 CAR T cells (1234), respectively, and co-cultured with various corresponding target cells (e.g., K19: K562-CD19). FIG. 78 illustrates the determination of phenotype and expression of a gene of interest using flow cytometry. After mixed cells were co-cultured for 7 days, flow cytometry was used to detect the phenotype of the cells and the expression of the gene of interest. For example, an approximate range of live cells was delineated (A), the adhesion cells were removed (B), DAPI staining was performed to delineate the living cell population (C), and the CD3-positive cell population (i.e., T cells) was delineated (D). Flow cytometry was used to determine the cell phenotype and CAR expression. For NT (T cells not expressing CAR) and CD19 CAR T Groups, CD8 percentages of NYESO-1 TCRTS and AFP TCRTS were 70.32%, 56.44%, 73.85% and 72.74% respectively. CD19 CAR expression was 63.71%, the expression of NYESO-1 TCR was 88.80%, and the expression of AFP TCR was 71.61%. The expression phenotypes of the cells were normal; the expression of CD137 was low; and the cells were already in a resting state, which could be used for subsequent experiments.

[0367] FIG. 79 shows the identification of co-cultured cells using flow cytometry. In order to distinguish the two kinds of T cells after co-culturing, CD19 CAR cells were stained with VIOLET to be labeled with purple fluorescence. Cells were divided into two groups by flow cytometry V450-PB channel: the positive group was CD19 CAR cells, and the negative group was NYESO-1/AFP TCRTS (C). The CD3 positive population was the T cell.

[0368] FIG. 80 shows results of flow cytometry analysis on activation of co-cultured cells including CD19 CAR T cells and NYESO-1 TCRTS. Various groups of cells were co-cultured for 24 hours, and activation of these cells was measured using flow cytometry. The activation of NYESO-1 TCRTS was very low in the control group NC (1.43% MFI=5559). The activation of NYESO-1 TCRTS in the PC group was normally (15.02%, MFI=23301). The activation of NYESO-1 TCRTS in group A (2.56%, MFI=6087) was higher than that in NC group (See 102 and 104). The activation of NYESO-1 TCRTS in group B (5.28%, MFI=12352) was higher than that of group A (2.56%, MFI=6087) (See 106 and 108). The activation of NYESO-1 TCRTS in group C (6.80%, MFI=12352) was higher than that in group B (5.28%, MFI=12352) (See 110 and 112). The activation of NYESO-1 TCRTS in group C was higher than in group A (See 114 and 116).

[0369] FIG. 81 show results of flow cytometry analysis on the proliferation of co-cultured cells including CD19 CAR T cells and NYESO-1 TCRTS. Various groups of cells were co-cultured for 96 hours, and the proliferation of these cells was measured using flow cytometry. A comparison of cell proliferation was performed. The proliferation of NYESO-1 TCRTS cells in the NC control group was 2.46%. The proliferation of NYESO-1 TCRTS cells in group A was 28.17%, which was increased compared to the NC group (See 202). The proliferation of NYESO-1 TCRTS cells of group B was 41.60% higher than group A (See 204). The proliferation of NYESO-1 TCRTS cells of group C was 47.79%, which was higher than that of group B 41.60% (206) and higher than that of group A (See 208).

[0370] FIG. 82 show results of flow cytometry analysis on activation of co-cultured cells including CD19 CAR T cells and AFP TCRTS. Various groups of cells were co-cultured for 24 hours, and activation of these cells was measured using flow cytometry. The AFP TCRTS of the control group NC was not activated (0.70% MFI=4568). The activation of AFP TCRTS of PC group was normally (38.58%, MFI=23327). The activation of AFP TCRTS of group A (1.24%, MFI=4884) was higher than that of NC group (See 302 and 304). The activation of AFP TCRTS of group B (4.17%, MFI=13112) was higher than that of group A (1.24%, MFI=4884) (see 306 and 308). The activation of AFP TCRTS of group C (6.47%, MFI=14218) was higher than that in group B (4.17%, MFI=13112) (see 310 and 312) and was higher than that in group A (see 314 and 316). In addition, TCR negative T cells were also partially activated (NC=0.51%; A=1.46%; B=2.84%; C=5.12%). The relationship among the groups was the same as that of the positive part.

[0371] FIG. 83 shows results of flow cytometry analysis on the proliferation of co-cultured cells including CD19 CAR T cells and AFP TCRTS. Various groups of cells were co-cultured for 96 hours, and activation of these cells was measured using flow cytometry. A comparison of cell proliferation was performed. The proliferation rate of AFP TCRTS of the NC control group was 3.11%. The proliferation rate of AFP TCRTS of group A was 36.44%, which was increased compared to NC group (402). The proliferation rate of AFP TCRTS of group B was 39.59%, which was higher than 36.44% of group A (404). The proliferation rate of AFP TCRTS of group C was 51.97%, which was higher than 39.59% (406) in group B and higher than group A (408). Thus, CD19 CAR T cells enhance TCRT cells' expansion by increasing their proliferation rates.

[0372] These data show that the activated first type of CAR T cells can activate the second type of CAR T cells in coupled CAR T cells (e.g., CD19 CAR T cells and CLDN18.2 CAR T cells). For example, the activated first type of CAR T cells enhanced the activation, cytokine releases, and cell proliferation of the second type of CAR T cells. This effect was enhanced when PBMC was present. Given that PBMC and monocytes were activated, the first type of CAR T cells can activate monocytes (e.g., DCs), which can then activate the second type of CAR T cells. The combination of the data presented here and the data shown in the in vivo Examples of the present disclosure shows that subjects' dendritic cells (DCs) work as a medium to associate the activation of the first type of CAR T cells with the activation of the second type of CAR T cells and form a positive circle of activations, which may contribute to the expansion of CAR T cells observed in the subjects (Patients 004-011) due to amplification of immune homeostasis. These data and the clinical data above indicate that coupled or mixed T cells achieve enhanced T cell response including the expansion of T cells and/or cytokine release. Examples of the coupled or mixed T cells include BCMA and GUCY2C CAR T cells as well as CD19 CAR T cells and NYESO-1 TCRTS. After infusion of the mixed T cells to patients, a first group of T cells (e.g., CD19 and BCMA CAR T cells) bind an antigen of B cells and are activated. After their activation, the first group of CAR T cells up-regulates certain membrane molecules (e.g., CD28, OX40, 4-1BB, CD40L, etc.) and release certain cytokines (e.g., IFNγ and GM-CSF). These surface molecules and cytokines activate and/or recruit cells such as monocytes (e.g. DCs) and neutrophils. The recruited and/or activated cells release cytokines (e.g., TNFα, IL6, IL12) to form an inflammatory-like environment. In light of the inflammatory-like environment, these activated immune cells up-regulate some proteins (e.g., CD80, CD80, and CD40), which activate a second group of T cells (e.g., NT, CAR T cells targeting solid tumors, and NYESO-1 TCRTS). Also, cytokines (e.g., IFNγ) secreted by the first group of T cells also activate the second group of T cells.

### Example 4. Modified Cells Using ZFNs. TALENs, and/or Cas9

[0373] Multiple gene-specific ZFNs were constructed to enable the site-specific introduction of mutations. Various ZFNs were designed and incorporated into plasmid vectors essentially as described in Mala et al. (2005) Biochem Biophys Res Commun 335(2):447-57, Liu et al. (2002) J Bio Chem 277(6):3850-6, Sander et al. (2011) Nat Methods. 8(1):67-9, Umov et al. (2005) Nature 435(7042):646-651, and U.S. Patent Publication 2008/0131962. The ZFNs included various combinations of Zinc finger binding domains (e.g., ZFN-left and ZFN-right binding domains), which are listed in Table 14 and Table 15. The cleavage domain of the ZFNs comprised an engineered FokI cleavage domain (SEQ ID NOs: 280, 281, or 282).

TABLE 14
Exemplary ZFN pairs as well as the target sequences (Target site: the target
sequence for ZFN include two 9-bp recognition sites (i.e., upper case letters)
are separated by a 6-bp spacer)

| | | | | SEQ | | SEQ | | SEQ | | SEQ |
|---|---|---|---|---|---|---|---|---|---|---|
| Gene | ICT ZFN | | | ID | | ID | | ID | | ID |
| Name | Number | ZFN | Finger 1 | NO: | Finger 2 | NO: | Finger 3 | NO: | Target site | NO: |
| CTLA4 | ICTZF1L | ZFN-L | QSGSLTR | 301 | DRSDLTR | 302 | QSSALTR | 303 | TGCGGCAA | 304 |
| | ICTZF1R | ZFN-R | QRSNLVR | 306 | RSDHLTR | 306 | TSANLSR | 307 | CctacatGATG | |
| | | | | | | | | | GGGAA | |
| LAG3 | ICTZF2L | ZFN-L | QSSDLTR | 308 | RSDNLAR | 309 | QSGHLQR | 310 | AGCCTCTCC | 311 |
| | ICTZF2R | ZFN-R | RSDNLAR | 309 | QSSDLTR | 308 | RSDHLSR | 312 | agccaGGGG | |
| | | | | | | | | | CTGAG | |
| LAG3 | ICTZF3L | ZFN-L | RSDHLAR | 313 | QSGDLTR | 314 | RSDDLTR | 315 | CCCTGCCG | 319 |
| | ICTZF3R | ZFN-R | RSDALTR | 316 | TSGHLVR | 317 | QSSDLQR | 318 | CctgcctGCTG | |
| | | | | | | | | | GTGTG | |
| BTLA | ICTZF4L | ZFN-L | GGTALRM | 320 | QRSSLVR | 321 | QRNNLGR | 322 | GTTTACTTC | 326 |
| | ICTZF4R | ZFN-R | RKRNLIM | 323 | VRHNLTR | 324 | RGDKLGP | 326 | ctttggGGGGA | |
| | | | | | | | | | TTGC | |
| TIM3 | ICTZF5L | ZFN-L | SRFTLGR | 327 | RREHLVR | 328 | QTATLKR | 329 | CACCCCTG | 333 |
| | ICTZF5R | ZFN-R | KHSNLAR | 330 | QSTTLKR | 331 | RADGLQL | 332 | CaccgacTCG | |
| | | | | | | | | | GCAGAG | |
| TIM3 | ICTZF6L | ZFN-L | TRQKLET | 334 | RQDNLGR | 335 | QQHGLRH | 336 | ACCCTCACA | 340 |
| | ICTZF6R | ZFN-R | TKKILTV | 337 | HKSSLTR | 338 | RSDHLSL | 339 | accttTGGGTT | |
| | | | | | | | | | GTC | |
| FOXP3 | ICTZF7L | ZFN-L | RKHHLGR | 341 | RREHLVR | 28 | VSNSLAR | 342 | CCCCCCAG | 346 |
| | ICTZF7R | ZFN-R | RTSSLKR | 343 | QRSDLTR | 344 | RSDGLRG | 345 | CacccttTCGG | |
| | | | | | | | | | CTGTG | |
| FOXP3 | ICTZF8L | ZFN-L | DSPTLRR | 347 | QSAHLKR | 348 | QDVSLVR | 349 | GGCTCCTG | 352 |
| | ICTZF8R | ZFN-R | MKNTLTR | 350 | QRSDLTR | 344 | QSGTLTR | 351 | CtgcatcGTAG | |
| | | | | | | | | | CTGCT | |
| SIVA1 | ICTZF9L | ZFN-L | TKQILGR | 353 | QSTTLKR | 331 | RTEHLAR | 354 | AGCTGCCC | 296 |
| | ICTZF9R | ZFN-R | KRRDLDR | 355 | RREVLEN | 300 | DPSNLRR | 299 | CttcgcgGACG | |
| | | | | | | | | | TGGCC | |
| LGALS9 | ICTZF10L | ZFN-L | MKHHLDA | 298 | VRHNLTR | 324 | HHNSLTR | 297 | ACCATCAAC | 293 |
| | ICTZF10R | ZFN-R | KKDHLHR | 295 | RREVLEN | 300 | QTVNLDR | 294 | agactgGAAG | |
| | | | | | | | | | TGGGG | |
| CD33 | ICTZF11L | ZFN-L | QSGSLTR | 301 | RSDDLQR | 292 | RSDHLSR | 312 | TGCCGCCC | 289 |
| | ICTZF11R | ZFN-R | QSGHLAR | 291 | TSGNLVR | 290 | QSGHLQR | 310 | CtactgtGGAG | |
| | | | | | | | | | ATGGA | |
| SIVA1 | ICTZF12L | ZFN-L | QSSDLTR | 308 | QSGDLTR | 314 | RSDHLSR | 312 | AGCTGCCC | 285 |
| | ICTZF12R | ZFN-R | ERGTLAR | 288 | RSDALSR | 287 | DRSNLTR | 286 | CttcgcgGACG | |
| | | | | | | | | | TGGCC | |
| FOXP3 | ICTZF13L | ZFN-L | ERGTLAR | 288 | QSGHLQR | 310 | QSGDLTR | 314 | GGCTCCTG | 283 |
| | ICTZF13R | ZFN-R | QSSDLTR | 308 | QSSDLTR | 308 | QRASLTR | 284 | CtgcatcGTAG | |
| | | | | | | | | | CTGCT | |

[0374] ZFN-left arm plasmid vectors and ZFN-right arm plasmid vectors were transfected into Hela cells using fugene transfection reagent, respectively. 24 hours after transfection, Hela cells were treated with 1 μg/ml puromycin for 48 hours to obtain cells rich in ZFNs. Hela cells were then collected. Lysed DNA fragments containing ZFNs were amplified by PCR using primers specific to various genes (i.e., CTLA4, LAG3, BTLA, TIM3, FOXP3, SIVA1, or LGALS9) and the genome of Hela cells as templates. The DNA fragments were sequenced using forward primers. The DNA fragments were cloned into vectors. The DNA fragments of about 30 monoclonal cells were sequenced to determine whether the DNA fragments include mutations. The results of the sequencing are shown in Table 15.

TABLE 15
Monoclonal sequencing results for ZFNs that target
gene fragments, which are amplified by PCR.

| | | Number | Number | |
|---|---|---|---|---|
| ZFN | | of clones | of clones | Mutation |
| Left | Right | analyzed | mutated | frequency |
| ICTZF1L | ICTZF1R | 31 | 6 | 19% |
| ICTZF2L | ICTZF2R | 26 | 3 | 12% |
| ICTZF3L | ICTZF3R | 30 | 9 | 30% |
| ICTZF4L | ICTZF4R | 30 | 4 | 13% |
| ICTZF5L | ICTZF5R | 29 | 1 | 3% |
| ICTZF6L | ICTZF6R | 30 | 4 | 13% |
| ICTZF7L | ICTZF7R | 29 | 5 | 17% |
| ICTZF8L | ICTZF8R | 33 | 7 | 21% |
| ICTZF9L | ICTZF9R | 34 | 10 | 29% |
| ICTZF10L | ICTZF10R | 27 | 2 | 7% |
| ICTZF11L | ICTZF11R | 34 | 14 | 41% |
| ICTZF12L | ICTZF12R | 24 | 3 | 13% |
| ICTZF13L | ICTZF13R | 21 | 5 | 24% |

[0375] Multiple gene-specific ZFNs were constructed to enable site-specific introduction of mutations. Various ZFNs were designed and incorporated into plasmid vectors essentially as described (Mala et al. (2005) Biochem Biophys Res Commun 335(2):447-57; Liu et al. (2002) J Bio Chem 277(6):3850-6; Sander et al. (2011) Nat Methods. 8(1):67-9; Handel et al. (2009) Mol Ther. January; 17(1):104-11; Umov et al. (2005) Nature 435(7042):646-651; and U.S. Patent Publication 2008/0131962; which are incorporated by reference in their entireties). The ZFNs included various combinations of Zinc finger binding domains (e.g., ZFN-left and ZFN-right binding domains), which are listed in Table 16. The cleavage domain of the ZFNs comprises an engineered FokI cleavage domain (SEQ ID NOS.: 96, 97, or 98).

```
TABLE 16
Exemplary ZFN pairs as well as the target sequences
(Target site: the target sequence for ZFN include
  two 9-bp recognition sites (i.e., uppercase letters)
  separated by a 6-bp spacer).
```

| Gene | ICT | | | | | | Linker between |
|---|---|---|---|---|---|---|---|
| Name | ZFN # | ZFN | Finger 1 | Finger 2 | Finger 3 | Target site | ZFP and Fok1 |
| B2M | ICTZF | ZFN-L | RTSSLKR | QRSDLTR | RSDHLSL | CACAGCCC | TGPGAAARA |
| | 14L | | (SEQ ID | (SEQ ID | (SEQ ID | AagatagtTAA | (SEQ ID NO: 417) |
| | | | NO: 357) | NO: 358) | NO: 359) | GTGGGG | |
| | | | | | | (SEQ ID NO: | |
| | ICTZF | ZFN-R | KKDHLHR | RREVLEN | QRGNLNM | 360) | TGPGAAARA |
| | 14R | | (SEQ ID | (SEQ ID | (SEQ ID | | (SEQ ID NO: 417) |
| | | | NO: 361) | NO: 362) | NO: 363) | | |
| CIITA | ICTZF | RZFN-L | VPSKLKR | EAHHLSR | QDGNLTR | GCCACCTT | LRGSQ (SEQ ID |
| | 15L | | (SEQ ID | (SEQ ID | (SEQ ID | CccccaGCTG | NO: 418) |
| | | | NO: 364) | NO: 265) | NO: 366) | AAGTC | |
| | ICTZF | ZFN-R | TSTLLN | QQTNLTR | VGNSLTR | (SEQ ID NO: | LRGSQ (SEQ ID |
| | 15R | | (SEQ ID | (SEQ ID | (SEQ ID | 400) | NO: 418) |
| | | | NO: 367) | NO: 368) | NO: 369) | | |
| | ICTZF | ZFN-L | QSGSLTR | TSGNLVR | QSGDLTR | TGCATCTG | LRGSQ (SEQ ID |
| | 16L | | (SEQ ID | (SEQ ID | (SEQ ID | CgacgtgGGA | NO: 418) |
| | | | NO: 370) | NO: 371) | NO: 372) | GCCGAG | |
| | ICTZF | ZFN-R | RSDNLAR | DRSDLTR | QSGHLQR | (SEQ ID NO: | LRGSQ (SEQ ID |
| | 16R | | (SEQ ID | (SEQ ID | (SEQ ID | 401) | NO: 418) |
| | | | NO: 373) | NO: 374) | NO: 375) | | |
| | ICTZF | ZFN-L | DRSHLTR | RSDALSR | QSSDLQR | GCCCACAG | LRGSQ (SEQ ID |
| | 17L | | (SEQ ID | (SEQ ID | (SEQ ID | CcactcGTGG | NO: 418) |
| | | | NO: 376) | NO: 377) | NO: 378) | CGGCC | |
| | ICTZF | ZFN-R | ERGTLAR | RSDDLQR | RSDALTR | (SEQ ID NO: | LRGSQ (SEQ ID |
| | 17R | | (SEQ ID | (SEQ ID | (SEQ ID | 402) | NO: 418) |
| | | | NO: 379) | NO: 380) | NO: 381) | | |
| | ICTZF | ZFN-L | RSDHLAR | QSGDLTR | QSGHLQR | CCCTGCTC | LRGSQ (SEQ ID |
| | 18L | | (SEQ ID | (SEQ ID | (SEQ ID | CctccgGGGG | NO: 418) |
| | | | NO: 382) | NO: 383) | NO: 384) | CTGCT | |
| | ICTZF | ZFN-R | QSSDLTR | QSSDLTR | RSDHLSR | (SEQ ID NO: | LRGSQ (SEQ ID |
| | 18R | | (SEQ ID | (SEQ ID | (SEQ ID | 403) | NO: 418) |
| | | | NO: 385) | NO: 385) | NO: 387) | | |
| | ICTZF | ZFN-L | QSGHLAR | DRSDLTR | QSGNLAR | TCCGGCTT | LRGSQ (SEQ ID |
| | 19L | | (SEQ ID | (SEQ ID | (SEQ ID | CtccatGGAG | NO: 407) |
| | | | NO: 388) | NO: 389) | NO: 390) | CAGGC | |
| | ICTZF | ZFN-R | DRSHLTR | QSGDLTR | QSGHLQR | (SEQ ID | LRGSQ (SEQ ID |
| | 19R | | (SEQ ID | (SEQ ID | (SEQ ID | NO: 404) | NO: 418) |
| | | | NO: 391) | NO: 392) | NO: 393) | | |
| | ICTZF | ZFN-L | RSHILTN | QSTTLKR | DGGHLTR | CACTGCGC | LRGSQ (SEQ ID |
| | 20L | | (SEQ ID | (SEQ ID | (SEQ ID | CcacgagGCC | NO: 418) |
| | | | NO: 394) | NO: 395) | NO: 396) | GAGGAG | |
| | ICTZF | ZFN-R | RQMNLDR | RQDNLGR | DKSVLAR | (SEQ ID NO: | LRGSQ (SEQ ID |
| | 20R | | (SEQ ID | (SEQ ID | (SEQ ID | 405) | NO: 418) |
| | | | NO: 397) | NO: 398) | NO: 399) | | |

[0376] ZFN-left arm plasmid vectors and ZFN-right arm plasmid vectors were transfected into Hela cells using fugene transfection reagent, respectively. 24 hours after transfection, Hela cells were treated with 1 μg/mi puromycin for 48 hours to obtain cells rich in ZFNs. Hela cells were then collected. Lysed DNA fragments containing ZFNs were amplified by PCR using primers specific to the various genes (i.e., B32M and CIITA) and the genome of Hela cells as templates. The DNA fragments were sequenced using forward primers. The DNA fragments were cloned into vectors. The DNA fragments of about 30 monoclonal cells were sequenced to determine whether the DNA fragments include mutations. The results of the sequencing are shown in Table 18. T cells were introduced with TRAC-specific ZFNs constructed to enable the site-specific introduction of mutations at TRAC gene. Various ZFNs were designed and incorporated into plasmids vectors essentially as described (Umov et al. (2005) Nature 435(7042):646-651; Lombardo et al. (2007) Nat Biotechnol. November, 25(11):1298-306; and U.S. Patent Publication 2008/0131962; which are incorporated by reference in their entireties). The ZFNs included various combinations of Zinc finger binding domains (e.g., ZFN-left and ZFN-right binding domains), which are listed in Table 17. The cleavage domain of the ZFNs comprises a FokI cleavage domain (SEQ ID NOs: 96, 97, or 98). mRNA encoding a pair of ZFNs (see Table 17) was introduced into the transduced cells to modify a target genomic locus associated with the α chain of TCR.

TABLE 17

| | Recognition | | | | | | |
|---|---|---|---|---|---|---|---|
| ZFN | Sequence | F1 | F2 | F3 | F4 | F5 | F6 |
| ZFLm1 | GTTGCTCCAGG | QSGDLTR | QWGTRY | ERGTLAR | RSDNLRE | QSGDLTR | TSGALT |
| (left) | CCACAGCA | (SEQ | (SEQ | (SEQ | (SEQ | R (SEQ | R (SEQ |
| | (SEQ ID: 408) | ID: 409) | ID: 410) | ID: 411) | ID: 386) | ID: 412) | ID: 413) |
| ZFRm | GACTTTGCATGT | WRSSLAS | QSGSLTR | HKWVLR | DRSNLTR | | |
| 1-4 | (SEQ ID: 414) | (SEQ | (SEQ ID: | Q (SEQ | (SEQ | | |
| (right) | | ID: 415) | 416) | ID: 406) | ID: 407) | | |

[0377] TALENs for CIITA were designed to target exon 2 (211: gctgaccccctgtgcct (SEQ ID NO: 426); 2L2: gaccccctgtgcctct (SEQ ID NO: 427); 2R1: ctccagccaggtccatct (SEQ ID NO: 419); 2R2: tctccagccaggtccat (SEQ ID NO: 420)) and exon 3 (3L1: tcagcaggctgttgt (SEQ ID NO: 421); 3L2: tcagcaggctgttgtgt (SEQ ID NO: 422); 3R1: ccctggtctcttcat (SEQ ID NO: 423); 3R2: aagcctccctggtctt (SEQ ID NO: 424); 3R3: aagcctccctggtct (SEQ ID NO: 425)). The TALENs were constructed using the FastTALE TALEN Assembly Kit (Sidansai), and their activities were confirmed in 293T cells as previously described. The constructed TALENs were transfected into 293T cells and selected with 2 μg/ml puromycin (Sigma). The genomic DNA of 293T cells was harvested after selection. Subsequently, PCR and sequencing were performed to examine the efficiency of the TALENs. The plasmids expressing Cas9 and gRNA were co-transfected into 293T cells with fugene transfection reagent. After 72 hours, 293T cells were collected and the expression of B32m and HLA proteins was detected by flow cytometry.

TABLE 18
Monoclonal sequencing results for ZFNs that target
various gene fragments, which are amplified by PCR.

| | | Number | Number | |
|---|---|---|---|---|
| ZFN | | of clones | of clones | Mutation |
| Left | Right | analyzed | mutated | frequency |
| ICTZF14L | ICTZF14R | 33 | 10 | 30% |
| ICTZF15L | ICTZF15R | 26 | 3 | 12% |
| ICTZF16L | ICTZF16R | 31 | 7 | 23% |
| ICTZF17L | ICTZF17R | 35 | 3 | 9% |
| ICTZF18L | ICTZF18R | 27 | 6 | 22% |
| ICTZF19L | ICTZF19R | 32 | 9 | 28% |
| ICTZF20L | ICTZF20R | 30 | 1 | 3% |

[0378] All publications, patents and patent applications cited in this specification are incorporated herein by reference in their entireties as if each individual publication, patent or patent application were specifically and individually indicated to be incorporated by reference. While the foregoing has been described in terms of various embodiments, the skilled artisan will appreciate that various modifications, substitutions, omissions, and changes may be made without departing from the spirit thereof.

The application's sequence listing, which the Patent Office published only in electronic form, follows.

SEQUENCE LISTING (504 sequences)

SEQ ID NO: 1 - protein, 21 aa, Artificial Sequence
  Synthesized
MALPVTALLLPLALLLHAARP

SEQ ID NO: 2 - protein, 69 aa, Artificial Sequence
  Synthesized
AKPTTTPAPRPPTPAPTIASQPLSLRPEACRPAAGGAVHTRGLDFACDIYIWAPLAGTCGVLLLSLVIT

SEQ ID NO: 3 - protein, 42 aa, Artificial Sequence
  Synthesized
KRGRKKLLYIFKQPFMRPVQTTQEEDGCSCRFPEEEEGGCEL

SEQ ID NO: 4 - protein, 112 aa, Artificial Sequence
  Synthesized
RVKFSRSADAPAYKQGQNQLYNELNLGRREEYDVLDKRRGRDPEMGGKPRRKNPQEGLYNELQKDKMAEAYSEIGMKGERRRGKGHDGLYQGLSTATKDTYDALHMQALPPR

SEQ ID NO: 5 - protein, 242 aa, Artificial Sequence
  Synthesized
DIQMTQSPSSLSASVGDRVTITCRASQDISKYLNWYQQKPGKAPKLLIYHTSRLHSGVPSRFSGSGSGTDFTLTISSLQPEDFATYYCQQGNTLPYTFGQGTKVEIKGGGGSGGGGSGGGGSEVQLVESGGGLVQPGGSLRLSCAASGVSLPDYGVSWVRQAPGKGLEWVSVIWGSETTYYNSALKSRFTISRDNAKNSLYLQMNSLRAEDTAVYYCAKHYYYGGSYAMDYWGQGTLVTVSS

SEQ ID NO: 6 - protein, 242 aa, Artificial Sequence
  Synthesized
DIQMTQTTSSLSASLGDRVTISCRASQDISKYLNWYQQKPDGTVKLLIYHTSRLHSGVPSRFSGSGSGTDYSLTISNLEQEDIATYFCQQGNTLPYTFGGGTKLEITGGGGSGGGGSGGGGSEVKLQESGPGLVAPSQSLSVTCTVSGVSLPDYGVSWIRQPPRKGLEWLGVIWGSETTYYNSALKSRLTIIKDNSKSQVFLKMNSLQTDDTAIYYCAKHYYYGGSYAMDYWGQGTSVTVSS

SEQ ID NO: 7 - protein, 237 aa, Artificial Sequence
  Synthesized
DIQMTQSPASLSVSVGETVTITCRASENIYSNLAWYQQKQGKSPQLLVYVATNLADGVPSRFSGSGSGTQYSLKINSLQSEDFGSYYCQHFWGTPYTFGGGTKLGGGGSGGGGSGGGGSEVQLQQSGAELVKPGASVKLSCTASGFNINDTYMHWVKQRPEQGLEWIGRIDPANGNTKYDPKFQGKATITADTSSNTAYLQLSSLTSEDTAVYYCARGARGSRFAYWGQGTLVTVSA

SEQ ID NO: 8 - protein, 244 aa, Artificial Sequence
  Synthesized
QSVLTQPPSVSAAPGQKVTISCSGSSSDIGSNYVSWYQQFPGTAPKLLIYDNNKRPSAIPDRFSGSKSGTSATLGITGLQTGDEADYYCGTWDSRLGIAVFGGGTQLTVLGGGGSGGGGSGGGGSEVQLVQSGAEVKKPGQSLKISCKASGYSLTDNWIGWVRQKPGKGLEWMGIIYPGDSDTRYSPSFQGQVTISADKSINTAYLQWSSLKASDTAIYYCVGLDWNYNPLRYWGPGTLVTVSS

SEQ ID NO: 9 - protein, 252 aa, Artificial Sequence
  Synthesized
DIVLTQSPASLAVSLGQGATISCRASKSVSTSGYTYMHWYQQKPGQPPKLLIYLASNLESGVPARFSGSGSGTDFTLNIHPVEEEDAATYYCQHSGELPPSFGGGTKLEIKRAGGGGSGGGGSGGGGSEVQLVESGGDLVKPGGSLKLSCAVSGFTFSSYGMSWVRQTPDKRLEWVATVSSGGTYTYYPDSVKGRFTISRDNAKNTLYLQMSSLKSEDSAMYYCARHRGNYYATYYYAMDYWGQGTSVTVSS

SEQ ID NO: 10 - protein, 243 aa, Artificial Sequence
  Synthesized
DVQITQSPSYLAASPGETITINCRASKSISKYLAWYQEKPGKTNKLLIYSGSTLQSGIPSRFSGSGSGTDFTLTISSLEPEDFAMYYCQQHHEYPYTFGGGTKLEIKGGGGSGGGGSGGGGSQVQLQQPGAELVRPGASVKLSCKASGYTFTTYWMNWVKQRPEQGLEWIGRIDPYDSETHYNQKFKDKAILTVDKSSSTAYMQLSSLTSEDSAVYYCARGPYYGTNPWFPYWGQGTLVTVSS

SEQ ID NO: 11 - protein, 241 aa, Artificial Sequence
  Synthesized
EIVMTQSPATLSVSPGERATLSCRASQSVSRNLAWYQQKPGQAPRLLIYGASTRATGIPARFSGSGSGTEFTLTIGSLQSEDFAVYYCQQYKTWPRTFGQGTNVEIKGGGGSGGGGSGGGGSQVQLQQWGAGLLKPSETLSLTCAVFGGSFSGYYWSWIRQPPGKGLEWIGEINHRGNTNDNPSLKSRVTISVDTSKNQFALKLSSVTAADTAVYYCARERGYTYGNFDHWGQGTLVTVSS

SEQ ID NO: 12 - protein, 246 aa, Artificial Sequence
  Synthesized
DVVMTQTPLSLPVRLGDQASISCRSSQSLVHSNGNTYLHWYLQKPGQSPKLLIYKVSNRFSGVPDRFSGSGSGTNFTLKISRVEAEDLGLYFCSQSTHVPYTFGGGTKLEIKRAGGGGSGGGGSGGGGSQVQLRQSGPELVKPGASVKMSCKASGYTFTDYVISWVKQRTGQGLEWIGDIYPGSGYSFYNENFKGKATLTADKSSTTAYMQLSSLTSEDSAVYFCATYYNYPFAYWGQGTLVTVSA

SEQ ID NO: 13 - protein, 199 aa, Artificial Sequence
  Synthesized
LPICPGGAARCQVTLRDLFDRAVVLSHYIHNLSSEMFSEFDKRYTHGRGFITKAINSCHTSSLATPEDKEQAQQMNQKDFLSLIVSILRSWNEPLYHLVTEVRGMQEAPEAILSKAVEIEEQTKRLLEGMELIVSQVHPETKENEIYPVWSGLPSLQMADEESRLSAYYNLLHCLRRDSHKIDNYLKLLKCRIIHNNNC

SEQ ID NO: 14 - protein, 240 aa, Artificial Sequence
  Synthesized
DIVMTQSPDSLAVSLGERATINCKSSQSLLNSRTRKNYLAWYQQKPGQPPKLLIYWASTRESGVPDRFSGSGSGTDFTLTISSLQAEDVAVYYCTQSFILRTFGQGTKVEIKGGGGGSGGGGSGGGGSDIVMTQSPDSLAVSLGERATINCKSSQSLLNSRTRKNYLAWYQQKPGQPPKLLIYWASTRESGVPDRFSGSGSGTDFTLTISSLQAEDVAVYYCTQSFILRTFGQGTKVEIK

SEQ ID NO: 15 - protein, 281 aa, Artificial Sequence
  Synthesized
MNVPTQLLGLLLLWLTGGKCDIQMTQSPASLSASLEEIVTITCKASQAIDAYLSWYQQKPGKSPQLLIYDATSLADGVPSRFSGSRSGTQYSLKISRPQVDDSGIYYCLQSYSTPFTFGSGTKLEIKGGGGGSGGGGSGGGGSMAVLVLLLCLLIFPSCVLSQVQLKESGPGLVQPSQTLSLTCTVSGSSLTSNSVSWIRQPPGKGLEWMGVIWSNGDADYNSAIKSRLSISRDTSKSQVFLKMNSLQTEDTAMYFCASPYYGYYFPFDYWGQGVMVTVSS

SEQ ID NO: 16 - protein, 285 aa, Artificial Sequence
  Synthesized
METDTLLLWVLLLWVPGSTGDIVLTQSPALAVSLGQRATISCRASQSVSISSHDLMQWYQQKPGQQPKLLIYDAFNLASGIPVRFSGSGSGTDFTLTIDPVQADDIATYYCQQSKDDPYTFGAGTKLELKGGGGGSGGGGSGGGGSMDIRLSLAFLVLFIKGVQCEVQLVESGGGLVQPGRSMKLSCAASGFTFSNYGMAWVRQAPTKGLEWVATISYDGSITYYRDSVKGRFTISRDHAKSTLYLQMNSLRSEDTATYYCTREEQYSSWYFDFWGPGIMVTVSS

SEQ ID NO: 17 - protein, 242 aa, Artificial Sequence
  Synthesized
NIVMTQSPSSLSASVGDRVTITCQASQDVGTAVAWYQQKPDQSPKLLIYWTSTRHTGVPDRFTGSGSGTDFTLTISSLQPEDIATYFCHQYNSYNTFGSGTKLEIKGGGGGSGGGGSGGGGSQVTLKESGPVLVKPTETLTLTCTFSGFSLSTSGMGVGWIRQAPGKGLEWVAHIWWDDDVYYNPSLKSRLTITKDASKDQVSLKLSSVTAADTAVYYCVRRRATGTGFDYWGQGTLVTVSS

SEQ ID NO: 18 - protein, 272 aa, Homo sapiens
PEEPLVVKVEEGDNAVLQCLKGTSDGPTQQLTWSRESPLKPFLKLSLGLPGLGIHMRPLAIWLFIFNVSQQMGGFYLCQPGPPSEKAWQPGWTVNVEGSGELFRWNVSDLGGLGCGLKNRSSEGPSSPSGKLMSPKLYVWAKDRPEIWEGEPPCLPPRDSLNQSLSQDLTMAPGSTLWLSCGVPPDSVSRGPLSWTHVHPKGPKSLLSLELKDDRPARDMWVMETGLLLPRATAQDAGKYYCHRGNLTMSFHLEITARPVLWHWLLRTGGWK

SEQ ID NO: 19 - protein, 205 aa, Homo sapiens
ISSMDMERPGDGKCQPIEIPMCKDIGYNMTRMPNLMGHENQREAAIQLHEFAPLVEYGCHGHLRFFLCSLYAPMCTEQVSTPIPACRVMCEQARLKCSPIMEQFNFKWPDSLDCRKLPNKNDPNYLCMEAPNNGSDEPTRGSGLFPPLFRPQRPHSAQEHPLKDGGPGRGGCDNPGKFHHVEKSASCAPLCTPGVDVYWSREDKR

SEQ ID NO: 20 - protein, 393 aa, Homo sapiens
GMGCSSPPCECHQEEDFRVTCKDIQRIPSLPPSTQTLKLIETHLRTIPSHAFSNLPNISRIYVSIDVTLQQLESHSFYNLSKVTHIEIRNTRNLTYIDPDALKELPLLKFLGIFNTGLKMFPDLTKVYSTDIFFILEITDNPYMTSIPVNAFQGLCNETLTLKLYNNGFTSVQGYAFNGTKLDAVYLNKNKYLTVIDKDAFGGVYSGPSLLDVSQTSVTALPSKGLEHLKELIARNTWTLKKLPLSLSFLHLTRADLSYPSHCCAFKNQKKIRGILESLMCNESSMQSLRQRKSVNALNSPLHQEYEENLGDSIVGYKEKSKFQDTHNNAHYYVFFEEQEDEIIGFGQELKNPQEETLQAFDSHYDYTICGDSEDMVCTPKSDEFNPCEDIMG

SEQ ID NO: 21 - protein, 210 aa, Homo sapiens
QLPPGKPEIFKCRSPNKETFTCWWRPGTDGGLPTNYSLTYHREGETLMHECPDYITGGPNSCHFGKQYTSMWRTYIMMVNATNQMGSSFSDELYVDVTYIVQPDPPLELAVEVKQPEDRKPYLWIKWSPPTLIDLKTGWFTLLYEIRLKPEKAAEWEIHFAGQQTEFKILSLHPGQKYLVQVRCKPDHGYWSAWSPATFIQIPSDFTMND

SEQ ID NO: 22 - protein, 4368 aa, Homo sapiens
EQDLSVNRAVWDGGGCISQGDVLNRQCQQLSQHVRTGSAANTATGTTSTNVVEPRMYLSCSTNPEMTSIESSVTSDTPGVSSTRMTPTESRTTSESTSDSTTLFPSSTEDTSSPTTPEGTDVPMSTPSEESISSTMAFVSTAPLPSFEAYTSLTYKVDMSTPLTTSTQASSSPTTPESTTIPKSTNSEGSTPLTSMPASTMKVASSEAITLLTTPVEISTPVTISAQASSSPTTAEGPSLSNSAPSGGSTPLTRMPLSVMLVVSSEASTLSTTPAATNIPVITSTEASSSPTTAEGTSIPTSTYTEGSTPLTSTPASTMPVATSEMSTLSITPVDTSTLVTTSTEPSSLPTTAEATSMLTSTLSEGSTPLTNMPVSTILVASSEASTTSTIPVDSKTFVTTASEASSSPTTAEDTSIATSTPSEGSTPLTSMPVSTTPVASSEASNLSTTPVDSKTQVTTSTEASSSPPTAEVNSMPTSTPSEGSTPLTSMSVSTMPVASSEASTLSTTPVDTSTPVTTSSEASSSSTTPEGTSIPTSTPSEGSTPLTNMPVSTRLVVSSEASTTSTTPADSNTFVTTSSEASSSSTTAEGTSMPTSTYSERGTTITSMSVSTTLVASSEASTLSTTPVDSNTPVTTSTEATSSSTTAEGTSMPTSTYTEGSTPLTSMPVNTTLVASSEASTLSTTPVDTSTPVTTSTEASSSPTTADGASMPTSTPSEGSTPLTSMPVSKTLLTSSEASTLSTTPLDTSTHITTSTEASCSPTTTEGTSMPISTPSEGSPLLTSIPVSITPVTSPEASTLSTTPVDSNSPVTTSTEVSSSPTPAEGTSMPTSTYSEGRTPLTSMPVSTTLVATSAISTLSTTPVDTSTPVTNSTEARSSPTTSEGTSMPTSTPGEGSTPLTSMPDSTTPVVSSEARTLSATPVDTSTPVTTSTEATSSPTTAEGTSIPTSTPSEGTTPLTSTPVSHTLVANSEASTLSTTPVDSNTPLTTSTEASSPPPTAEGTSMPTSTPSEGSTPLTRMPVSTTMVASSETSTLSTTPADTSTPVTTYSQASSSSTTADGTSMPTSTYSEGSTPLTSVPVSTRLVVSSEASTLSTTPVDTSIPVTTSTEASSSPTTAEGTSIPTSPPSEGTTPLASMPVSTTLVVSSEANTLSTTPVDSKTQVATSTEASSPPPTAEVTSMPTSTPGERSTPLTSMPVRHTPVASSEASTLSTSPVDTSTPVTTSAETSSSPTTAEGTSLPTSTTSEGSTLLTSIPVSTTLVTSPEASTLLTTPVDTKGPVVTSNEVSSSPTPAEGTSMPTSTYSEGRTPLTSIPVNTTLVASSAISILSTTPVDNSTPVTTSTEACSSPTTSEGTSMPNSNPSEGTTPLTSIPVSTTPVVSSEASTLSATPVDTSTPGTTSAEATSSPTTAEGISIPTSTPSEGKTPLKSIPVSNTPVANSEASTLSTTPVDSNSPVVTSTAVSSSPTPAEGTSIAISTPSEGSTALTSIPVSTTTVASSEINSLSTTPAVTSTPVTTYSQASSSPTTADGTSMQTSTYSEGSTPLTSLPVSTMLVVSSEANTLSTTPIDSKTQVTASTEASSSTTAEGSSMTISTPSEGSPLLTSIPVSTTPVASPEASTLSTTPVDSNSPVITSTEVSSSPTPAEGTSMPTSTYTEGRTPLTSITVRTTPVASSAISTLSTTPVDNSTPVTTSTEARSSPTTSEGTSMPNSTPSEGTTPLTSIPVSTTPVLSSEASTLSATPIDTSTPVTTSTEATSSPTTAEGTSIPTSTLSEGMTPLTSTPVSHTLVANSEASTLSTTPVDSNSPVVTSTAVSSSPTPAEGTSIATSTPSEGSTALTSIPVSTTTVASSETNTLSTTPAVTSTPVTTYAQVSSSPTTADGSSMPTSTPREGRPPLTSIPVSTTTVASSEINTLSTTLADTRTPVTTYSQASSSPTTADGTSMPTPAYSEGSTPLTSMPLSTTLVVSSEASTLSTTPVDTSTPATTSTEGSSSPTTAGGTSIQTSTPSERTTPLAGMPVSTTLVVSSEGNTLSTTPVDSKTQVTNSTEASSSATAEGSSMTISAPSEGSPLLTSIPLSTTPVASPEASTLSTTPVDSNSPVITSTEVSSSPIPTEGTSMQTSTYSDRRTPLTSMPVSTTVVASSAISTLSTTPVDTSTPVTNSTEARSSPTTSEGTSMPTSTPSEGSTPFTSMPVSTMPVVTSEASTLSATPVDTSTPVTTSTEATSSPTTAEGTSIPTSTLSEGTTPLTSIPVSHTLVANSEVSTLSTTPVDSNTPFTTSTEASSPPPTAEGTSMPTSTSSEGNTPLTRMPVSTTMVASFETSTLSTTPADTSTPVTTYSQAGSSPTTADDTSMPTSTYSEGSTPLTSVPVSTMPVVSSEASTHSTTPVDTSTPVTTSTEASSSPTTAEGTSIPTSPPSEGTTPLASMPVSTTPVVSSEAGTLSTTPVDTSTPMTTSTEASSSPTTAEDIVVPISTASEGSTLLTSIPVSTTPVASPEASTLSTTPVDSNSPVVTSTEISSSATSAEGTSMPTSTYSEGSTPLRSMPVSTKPLASSEASTLSTTPVDTSIPVTTSTETSSSPTTAKDTSMPISTPSEVSTSLTSILVSTMPVASSEASTLSTTPVDTRTLVTTSTGTSSSPTTAEGSSMPTSTPGERSTPLTNILVSTTLLANSEASTLSTTPVDTSTPVTTSAEASSSPTTAEGTSMRISTPSDGSTPLTSILVSTLPVASSEASTVSTTAVDTSIPVTTSTEASSSPTTAEVTSMPTSTPSETSTPLTSMPVNHTPVASSEAGTLSTTPVDTSTPVTTSTKASSSPTTAEGIVVPISTASEGSTLLTSIPVSTTPVASSEASTLSTTPVDTSIPVTTSTEGSSSPTTAEGTSMPISTPSEVSTPLTSILVSTVPVAGSEASTLSTTPVDTRTPVTTSAEASSSPTTAEGTSMPISTPGERRTPLTSMSVSTMPVASSEASTLSRTPADTSTPVTTSTEASSSPTTAEGTGIPISTPSEGSTPLTSIPVSTTPVAIPEASTLSTTPVDSNSPVVTSTEVSSSPTPAEGTSMPISTYSEGSTPLTGVPVSTTPVTSSAISTLSTTPVDTSTPVTTSTEAHSSPTTSEGTSMPTSTPSEGSTPLTYMPVSTMLVVSSEDSTLSATPVDTSTPVTTSTEATSSTTAEGTSIPTSTPSEGMTPLTSVPVSNTPVASSEASILSTTPVDSNTPLTTSTEASSSPPTAEGTSMPTSTPSEGSTPLTSMPVSTTTVASSETSTLSTTPADTSTPVTTYSQASSSPPIADGTSMPTSTYSEGSTPLTNMSFSTTPVVSSEASTLSTTPVDTSTPVTTSTEASLSPTTAEGTSIPTSSPSEGTTPLASMPVSTTPVVSSEVNTLSTTPVDSNTLVTTSTEASSSPTIAEGTSLPTSTTSEGSTPLSIMPLSTTPVASSEASTLSTTPVDTSTPVTTSSPTNSSPTTAEVTSMPTSTAGEGSTPLTNMPVSTTPVASSEASTLSTTPVDSNTFVTSSSQASSSPATLQVTTMRMSTPSEGSSSLTTMLLSSTYVTSSEASTPSTPSVDRSTPVTTSTQSNSTPTPPEVITLPMSTPSEVSTPLTIMPVSTTSVTISEAGTASTLPVDTSTPVITSTQVSSSPVTPEGTTMPIWTPSEGSTPLTTMPVSTTRVTSSEGSTLSTPSVVTSTPVTTSTEAISSSATLDSTTMSVSMPMEISTLGTTILVSTTPVTRFPESSTPSIPSVYTSMSMTTASEGSSSPTTLEGTTTMPMSTTSERSTLLTTVLISPISVMSPSEASTLSTPPGDTSTPLLTSTKAGSFSIPAEVTTIRISITSERSTPLTTLLVSTTLPTSFPGASIASTPPLDTSTTFTPSTDTASTPTIPVATTISVSVITEGSTPGTTIFIPSTPVTSSTADVFPATTGAVSTPVITSTELNTPSTSSSSTTTSFSTTKEFTTPAMTTAAPLTYVTMSTAPSTPRTTSRGCTTSASTLSATSTPHTSTSVTTRPVTPSSESSRPSTITSHTIPPTFPPAHSSTPPTTSASSTTVNPEAVTTMTTRTKPSTRTTSFPTVTTTAVPTNTTIKSNPTSTPTVPRTTTCFGDGCQNTASRCKNGGTWDGLKCQCPNLYYGELCEEVVSSIDIGPPETISAQMELTVTVTSVKFTEELKNHSSQEFQEFKQTFTEQMNIVYSGIPEYVGVNITKLRLGSVVVEHDVLLRTKYTPEYKTVLDNATEVVKEKITKVTTQQIMINDICSDMMCFNTTGTQVQNITVTQYDPEEDCRKMAKEYGDYFVVEYRDQKPYCISPCEPGFSVSKNCNLGKCQMSLSGPQCLCVTTETHWYSGETCNQGTQKSLVYG

SEQ ID NO: 23 - protein, 407 aa, Homo sapiens
SQVSQNCHNGSYEISVLMMGNSAFAEPLKNLEDAVNEGLEIVRGRLQNAGLNVTVNATFMYSDGLIHNSGDCRSSTCEGLDLLRKISNAQRMGCVLIGPSCTYSTFQMYLDTELSYPMISAGSFGLSCDYKETLTRLMSPARKLMYFLVNFWKTNDLPFKTYSWSTSYVYKNGTETEDCFWYLNALEASVSYFSHELGFKVVLRQDKEFQDILMDHNRKSNVIIMCGGPEFLYKLKGDRAVAEDIVIILVDLFNDQYFEDNVTAPDYMKNVLVLTLSPGNSLLNSSFSRNLSPTKRDFALAYLNGILLFGHMLKIFLENGENITTPKFAHAFRNLTFEGYDGPVTLDDWGDVDSTMVLLYTSVDTKKYKVLLTYDTHVNKTYPVDMSPTFTWKNSKLPNDITGRGPQ

SEQ ID NO: 24 - protein, 264 aa, Homo sapiens
PRFMGTISDVKTNVQLLKGRVDNISTLDSEIKKNSDGMEAAGVQIQMVNESLGYVRSQFLKLKTSVEKANAQIQILTRSWEEVSTLNAQIPELKSDLEKASALNTKIRALQGSLENMSKLLKRQNDILQVVSQGWKYFKGNFYYFSLIPKTWYSAEQFCVSRNSHLTSVTSESEQEFLYKTAGGLIYWIGLTKAGMEGDWSWVDDTPFNKVQSVRFWIPGEPNNAGNNEHCGNIKAPSLQAWNDAPCDKTFLFICKRPYVPSEP

SEQ ID NO: 25 - protein, 100 aa, Homo sapiens
DGNEEMGGITQTPYKVSISGTTVILTCPQYPGSEILWQHNDKNIGGDEDDKNIGSDEDHLSLKEFSELEQSGYYVCYPRGSKPEDANFYLYLRARVCENC

SEQ ID NO: 26 - protein, 371 aa, Homo sapiens
KKVVLGKKGDTVELTCTASQKKSIQFHWKNSNQIKILGNQGSFLTKGPSKLNDRADSRRSLWDQGNFPLIIKNLKIEDSDTYICEVEDQKEEVQLLVFGLTANSDTHLLQGQSLTLTLESPPGSSPSVQCRSPRGKNIQGGKTLSVSQLELQDSGTWTCTVLQNQKKVEFKIDIVVLAFQKASSIVYKKEGEQVEFSFPLAFTVEKLTGSGELWWQAERASSSKSWITFDLKNKEVSVKRVTQDPKLQMGKKLPLHLTLPQALPQYAGSGNLTLALEAKTGKLHQEVNLVVMRATQLQKNLTCEVWGPTSPKLMLSLKLENKEAKVSKREKAVWVLNPEAGMWQCLLSDSGQVLLESNIKVLPTWSTPVQP

SEQ ID NO: 27 - protein, 348 aa, Homo sapiens
RLSWYDPDFQARLTRSNSKCQGQLEVYLKDGWHMVCSQSWGRSSKQWEDPSQASKVCQRLNCGVPLSLGPFLVTYTPQSSIICYGQLGSFSNCSHSRNDMCHSLGLTCLEPQKTTPPTTRPPPTTTPEPTAPPRLQLVAQSGGQHCAGVVEFYSGSLGGTISYEAQDKTQDLENFLCNNLQCGSFLKHLPETEAGRAQDPGEPREHQPLPIQWKIQNSSCTSLEHCFRKIKPQKSGRVLALLCSGFQPKVQSRLVGGSSICEGTVEVRQGAQWAALCDSSSARSSLRWEEVCREQQCGSVNSYRVLDAGDPTSRGLFCPHQKLSQCHELWERNSYCKKVFVTCQDPNP

SEQ ID NO: 28 - DNA, 7902 bp, Artificial Sequence
  Synthesized
gtcgacactagtaatcaacctctggattacaaaatttgtgaaagattgactggtattcttaactatgttgctccttttacgctatgtggatacgctgctttaatgcctttgtatcatgctattgcttcccgtatggctttcattttctcctccttgtataaatcctggttgctgtctctttatgaggagttgtggcccgttgtcaggcaacgtggcgtggtgtgcactgtgtttgctgacgcaacccccactggttggggcattgccaccacctgtcagctcctttccgggactttcgctttccccctccctattgccacggcggaactcatcgccgcctgccttgcccgctgctggacaggggctcggctgttgggcactgacaattccgtggtgttgtcggggaagctgacgtcctttccatggctgctcgcctgtgttgccacctggattctgcgcgggacgtccttctgctacgtcccttcggccctcaatccagcggaccttccttcccgcggcctgctgccggctctgcggcctcttccgcgtcttcgccttcgccctcagacgagtcggatctccctttgggccgcctccccgcctgccgcggaattcgagctcggtacctttaagaccaatgacttacaaggcagctgtagatcttagccactttttaaaagaaaaggggggactggaagggctaattcactcccaacgaagacaagatctgctttttgcttgtactgagtctctctggttagaccagatctgagcctgggagctctctggctaactagggaacccactgcttaagcctcaataaagcttgccttgagtgcttcaagtagtgtgtgcccgtctgttgtgtgactctggtaactagagatccctcagacccttttagtcagtgtggaaaatctctagcagtagtagttcatgtcatcttattattcagtatttataacttgcaaagaaatgaatatcagagagtgagaggaacttgtttattgcagcttataatggttacaaataaagcaatagcatcacaaatttcacaaataaagcatttttttcactgcattctagttgtggtttgtccaaactcatcaatgtatcttatcatgtctggctctagctatcccgcccctaactccgcccatcccgcccctaactccgcccagttccgcccattctccgccccatggctgactaattttttttatttatgcagaggccgaggccgcctcggcctctgagctattccagaagtagtgaggaggcttttttggaggcctagggacgtacccaattcgccctatagtgagtcgtattacgcgcgctcactggccgtcgttttacaacgtcgtgactgggaaaaccctggcgttacccaacttaatcgccttgcagcacatccccctttcgccagctggcgtaatagcgaagaggcccgcaccgatcgcccttcccaacagttgcgcagcctgaatggcgaatgggacgcgccctgtagcggcgcattaagcgcggcgggtgtggtggttacgcgcagcgtgaccgctacacttgccagcgccctagcgcccgctcctttcgctttcttcccttcctttctcgccacgttcgccggctttccccgtcaagctctaaatcgggggctccctttagggttccgatttagtgctttacggcacctcgaccccaaaaaacttgattagggtgatggttcacgtagtgggccatcgccctgatagacggtttttcgccctttgacgttggagtccacgttctttaatagtggactcttgttccaaactggaacaacactcaaccctatctcggtctattcttttgatttataagggattttgccgatttcggcctattggttaaaaaatgagctgatttaacaaaaatttaacgcgaattttaacaaaatattaacgcttacaatttaggtggcacttttcggggaaatgtgcgcggaacccctatttgtttatttttctaaatacattcaaatatgtatccgctcatgagacaataaccctgataaatgcttcaataatattgaaaaaggaagagtatgagtattcaacatttccgtgtcgcccttattcccttttttgcggcattttgccttcctgtttttgctcacccagaaacgctggtgaaagtaaaagatgctgaagatcagttgggtgcacgagtgggttacatcgaactggatctcaacagcggtaagatccttgagagttttcgccccgaagaacgttttccaatgatgagcacttttaaagttctgctatgtggcgcggtattatcccgtattgacgccgggcaagagcaactcggtcgccgcatacactattctcagaatgacttggttgagtactcaccagtcacagaaaagcatcttacggatggcatgacagtaagagaattatgcagtgctgccataaccatgagtgataacactgcggccaacttacttctgacaacgatcggaggaccgaaggagctaaccgcttttttgcacaacatgggggatcatgtaactcgccttgatcgttgggaaccggagctgaatgaagccataccaaacgacgagcgtgacaccacgatgcctgtagcaatggcaacaacgttgcgcaaactattaactggcgaactacttactctagcttcccggcaacaattaatagactggatggaggcggataaagttgcaggaccacttctgcgctcggcccttccggctggctggtttattgctgataaatctggagccggtgagcgtggctctcgcggtatcattgcagcactggggccagatggtaagccctcccgtatcgtagttatctacacgacggggagtcaggcaactatggatgaacgaaatagacagatcgctgagataggtgcctcactgattaagcattggtaactgtcagaccaagtttactcatatatactttagattgatttaaaacttcatttttaatttaaaaggatctaggtgaagatcctttttgataatctcatgaccaaaatcccttaacgtgagttttcgttccactgagcgtcagaccccgtagaaaagatcaaaggatcttcttgagatcctttttttctgcgcgtaatctgctgcttgcaaacaaaaaaaccaccgctaccagcggtggtttgtttgccggatcaagagctaccaactctttttccgaaggtaactggcttcagcagagcgcagataccaaatactgttcttctagtgtagccgtagttaggccaccacttcaagaactctgtagcaccgcctacatacctcgctctgctaatcctgttaccagtggctgctgccagtggcgataagtcgtgtcttaccgggttggactcaagacgatagttaccggataaggcgcagcggtcgggctgaacggggggttcgtgcacacagcccagcttggagcgaacgacctacaccgaactgagatacctacagcgtgagctatgagaaagcgccacgcttcccgaagggagaaaggcggacaggtatccggtaagcggcagggtcggaacaggagagcgcacgagggagcttccagggggaaacgcctggtatctttatagtcctgtcgggtttcgccacctctgacttgagcgtcgatttttgtgatgctcgtcaggggggcggagcctatggaaaaacgccagcaacgcggcctttttacggttcctggccttttgctggccttttgctcacatgttctttcctgcgttatcccctgattctgtggataaccgtattaccgcctttgagtgagctgataccgctcgccgcagccgaacgaccgagcgcagcgagtcagtgagcgaggaagcggaagagcgcccaatacgcaaaccgcctctccccgcgcgttggccgattcattaatgcagctggcacgacaggtttcccgactggaaagcgggcagtgagcgcaacgcaattaatgtgagttagctcactcattaggcaccccaggctttacactttatgcttccggctcgtatgttgtgtggaattgtgagcggataacaatttcacacaggaaacagctatgaccatgattacgccaagcgcgcaattaaccctcactaaagggaacaaaagctggagctgcaagcttaatgtagtcttatgcaatactcttgtagtcttgcaacatggtaacgatgagttagcaacatgccttacaaggagagaaaaagcaccgtgcatgccgattggtggaagtaaggtggtacgatcgtgccttattaggaaggcaacagacgggtctgacatggattggacgaaccactgaattgccgcattgcagagatattgtatttaagtgcctagctcgatacataaacggctctctctggttagaccagatctgagcctgggagctctctggctaactagggaacccactgcttaagcctcaataaagcttgccttgagtgcttcaagtagtgtgtgcccgtctgttgtgtgactctggtaactagagatccctcagacccttttagtcagtgtggaaaatctctagcagtggcgcccgaacagggacttgaaagcgaaagggaaaccagaggagctctctcgacgcaggactcggcttgctgaagcgcgcacggcaagaggcgaggggcggcgactggtgagtacgccaaaaattttgactagcggaggctagaaggagagagatgggtgcgagagcgtcagtattaagcgggggagaattagatcgcgatgggaaaaaattcggttaaggccagggggaaagaaaaaatataaattaaaacatatagtatgggcaagcagggagctagaacgattcgcagttaatcctggcctgttagaaacatcagaaggctgtagacaaatactgggacagctacaaccatcccttcagacaggatcagaagaacttagatcattatataatacagtagcaaccctctattgtgtgcatcaaaggatagagataaaagacaccaaggaagctttagacaagatagaggaagagcaaaacaaaagtaagaccaccgcacagcaagcggccgctgatcttcagacctggaggaggagatatgagggacaattggagaagtgaattatataaatataaagtagtaaaaattgaaccattaggagtagcacccaccaaggcaaagagaagagtggtgcagagagaaaaaagagcagtgggaataggagctttgttccttgggttcttgggagcagcaggaagcactatgggcgcagcgtcaatgacgctgacggtacaggccagacaattattgtctggtatagtgcagcagcagaacaatttgctgagggctattgaggcgcaacagcatctgttgcaactcacagtctggggcatcaagcagctccaggcaagaatcctggctgtggaaagatacctaaaggatcaacagctcctggggatttggggttgctctggaaaactcatttgcaccactgctgtgccttggaatgctagttggagtaataaatctctggaacagatttggaatcacacgacctggatggagtgggacagagaaattaacaattacacaagcttaatacactccttaattgaagaatcgcaaaaccagcaagaaaagaatgaacaagaattattggaattagataaatgggcaagtttgtggaattggtttaacataacaaattggctgtggtatataaaattattcataatgatagtaggaggcttggtaggtttaagaatagtttttgctgtactttctatagtgaatagagttaggcagggatattcaccattatcgtttcagacccacctcccaaccccgaggggacccgacaggcccgaaggaatagaagaagaaggtggagagagagacagagacagatccattcgattagtgaacggatctcgacggtatcgatcacgagactagcctcgacacaaatggcagtattcatccacaattttaaaagaaaaggggggattggggggtacagtgcaggggaaagaatagtagacataatagcaacagacatacaaactaaagaattacaaaaacaaattacaaaaattcaaaattttcgggtttattacagggacagcagaaatccactttggctcgagaagcttgatatcggctccggtgcccgtcagtgggcagagcgcacatcgcccacagtccccgagaagttggggggaggggtcggcaattgaaccggtgcctagagaaggtggcgcggggtaaactgggaaagtgatgtcgtgtactggctccgcctttttcccgagggtgggggagaaccgtatataagtgcagtagtcgccgtgaacgttctttttcgcaacgggtttgccgccagaacacaggatccgccaccatggccttaccagtgaccgccttgctcctgccgctggccttgctgctccacgccgccaggccggatatccagatgacccagagcccgagcagcctgagcgcgagcgtgggtgatcgcgtgaccattacctgcagggcaagtcaggacattagtaaatatttaaattggtatcagcagaaaccgggtaaagcgccgaaactgttaatttatcatacatcaagattacactcaggcgtgccgtcgcgttttagcggctcgggttcgggcaccgattttaccctgaccatctcgagcttgcagccggaggacttcgccacctactattgccaacagggtaatacgcttccgtacacgttcggtcagggcaccaaagtggagatcaaaggtggcggtggctcgggcggtggtgggtcgggtggcggcggatctgaggtgcagctggtggagtctgggggaggcttggtacagcctggggggtccctgagactctcctgtgcagcctctggagtgtccctgcctgattatggcgtgtcctgggtccgccaggctccagggaaggggctggagtgggtttcagtgatctggggcagcgagacaacctactacaacagcgccctgaagtcccgattcaccatctccagagacaatgccaagaactcactgtatctgcaaatgaacagcctgagagccgaggacacggctgtgtattactgtgcgaagcactactactacggcggcagctacgctatggactactggggccaaggaaccctggtcaccgtgtcctcaaccacgacgccagcgccgcgaccaccaacaccggcgcccaccatcgcgtcgcagcccctgtccctgcgcccagaggcgtgccggccagcggcggggggcgcagtgcacacgagggggctggacttcgcctgtgatatctacatctgggcgcccttggccgggacttgtggggtccttctcctgtcactggttatcaccctttactgcaaacggggcagaaagaaactcctgtatatattcaaacaaccatttatgagaccagtacaaactactcaagaggaagatggctgtagctgccgatttccagaagaagaagaaggaggatgtgaactgagagtgaagttcagcaggagcgcagacgcccccgcgtacaagcagggccagaaccagctctataacgagctcaatctaggacgaagagaggagtacgatgttttggacaagaggcgtggccgggaccctgagatggggggaaagccgagaaggaagaaccctcaggaaggcctgtacaatgaactgcagaaagataagatggcggaggcctacagtgagattgggatgaaaggcgagcgccggaggggcaaggggcacgatggcctttaccagggtctcagtacagccaccaaggacacctacgacgcccttcacatgcaggccctgccccctcgctaatctagaggcgcgcc

SEQ ID NO: 29 - protein, 66 aa, Artificial Sequence
  Synthesized
TTTPAPRPPTPAPTIASQPLSLRPEACRPAAGGAVHTRGLDFACDIYIWAPLAGTCGVLLLSLVIT

SEQ ID NO: 30 - protein, 69 aa, Artificial Sequence
  Synthesized
TTTPAPRPPTPAPTIASQPLSLRPEACRPAAGGAVHTRGLDFACDIYIWAPLAGTCGVLLLSLVITLYC

SEQ ID NO: 31 - protein, 72 aa, Artificial Sequence
  Synthesized
AKPTTTPAPRPPTPAPTIASQPLSLRPEACRPAAGGAVHTRGLDFACDIYIWAPLAGTCGVLLLSLVITLYC

SEQ ID NO: 32 - protein, 69 aa, Artificial Sequence; identical to SEQ ID NO: 2
  Synthesized

SEQ ID NO: 33 - protein, 50 aa, Artificial Sequence
  Synthesized
AKPTTTPAPRPPTPAPTIASQPLSLRPEACRPAAGGAVHTRGLDFACDIY

SEQ ID NO: 34 - protein, 50 aa, Artificial Sequence; identical to SEQ ID NO: 33
  Synthesized

SEQ ID NO: 35 - protein, 47 aa, Artificial Sequence
  Synthesized
TTTPAPRPPTPAPTIASQPLSLRPEACRPAAGGAVHTRGLDFACDIY

SEQ ID NO: 36 - protein, 47 aa, Artificial Sequence; identical to SEQ ID NO: 35
  Synthesized

SEQ ID NO: 37 - protein, 22 aa, Artificial Sequence
  Synthesized
IWAPLAGTCGVLLLSLVITLYC

SEQ ID NO: 38 - protein, 22 aa, Artificial Sequence
  Synthesized
IWAPLAGTCGVLLLSLVITLYC

SEQ ID NO: 39 - protein, 120 aa, Artificial Sequence
  Synthesized
PEEPLVVKVEEGDNAVLQCLKGTSDGPTQQLTWSRESPLKPFLKLSLGLPGLGIHMRPLAIWLFIFNVSQQMGGFYLCQPGPPSEKAWQPGWTVNVEGSGELFRWNVSDLGGLGCGLKNR

SEQ ID NO: 40 - protein, 19 aa, Artificial Sequence
  Synthesized
IWAPLAGTCGVLLLSLVIT

SEQ ID NO: 41 - DNA, 339 bp, Artificial Sequence
  Synthesized
agagtgaagttcagcaggagcgcagacgcccccgcgtaccagcagggccagaaccagctctataacgagctcaatctaggacgaagagaggagtacgatgttttggacaagaggcgtggccgggaccctgagatggggggaaagccgagaaggaagaaccctcaggaaggcctgtacaatgaactgcagaaagataagatggcggaggcctacagtgagattgggatgaaaggcgagcgccggaggggcaaggggcacgatggcctttaccagggtctcagtacagccaccaaggacacctacgacgcccttcacatgcaggccctgccccctcgctaa

SEQ ID NO: 42 - DNA, 1689 bp, Artificial Sequence
  Synthesized
cggctccggtgcccgtcagtgggcagagcgcacatcgcccacagtccccgagaagttggggggaggggtcggcaattgaaccggtgcctagagaaggtggcgcggggtaaactgggaaagtgatgtcgtgtactggctccgcctttttcccgagggtgggggagaaccgtatataagtgcagtagtcgccgtgaacgttctttttcgcaacgggtttgccgccagaacacaggatccgccaccatggccttaccagtgaccgccttgctcctgccgctggccttgctgctccacgccgccaggccggacatccagctcacccagtccccgagctcgctgtccgcctccgtgggagatcgggtcaccatcacgtgccgcgccagccagtcgatttcctcctacctgaactggtaccaacagaagcccggaaaagccccgaagcttctcatctacgccgcctcgagcctgcagtcaggagtgccctcacggttctccggctccggttccggtactgatttcaccctgaccatttcctccctgcaaccggaggacttcgctacttactactgccagcagtcgtactccaccccctacactttcggacaaggcaccaaggtcgaaatcaagggtggcggtggctcgggcggtggtgggtcgggtggcggcggatctgaagtgcaattggtggaatcagggggaggacttgtgcagcctggaggatcgctgagactgtcatgtgccgtgtccggctttgccctgtccaaccacgggatgtcctgggtccgccgcgcgcctggaaagggcctcgaatgggtgtcgggtattgtgtacagcggtagcacctactatgccgcatccgtgaaggggagattcaccatcagccgggacaactccaggaacactctgtacctccaaatgaattcgctgaggccagaggacactgccatctactactgctccgcgcatggcggagagtccgacgtctggggacaggggaccaccgtgaccgtgtctagcaccacgacgccagcgccgcgaccaccaacaccggcgcccaccatcgcgtcgcagcccctgtccctgcgcccagaggcgtgccggccagcggcggggggcgcagtgcacacgagggggctggacttcgcctgtgatatctacatctgggcgcccttggccgggacttgtggggtccttctcctgtcactggttatcaccctttactgcaaacggggcagaaagaaactcctgtatatattcaaacaaccatttatgagaccagtacaaactactcaagaggaagatggctgtagctgccgatttccagaagaagaagaaggaggatgtgaactgagagtgaagttcagcaggagcgcagacgcccccgcgtaccagcagggccagaaccagctctataacgagctcaatctaggacgaagagaggagtacgatgttttggacaagaggcgtggccgggaccctgagatggggggaaagccgagaaggaagaaccctcaggaaggcctgtacaatgaactgcagaaagataagatggcggaggcctacagtgagattgggatgaaaggcgagcgccggaggggcaaggggcacgatggcctttaccagggtctcagtacagccaccaaggacacctacgacgcccttcacatgcaggccctgccccctcgctaa

SEQ ID NO: 43 - DNA, 1689 bp, Homo sapiens
cggctccggtgcccgtcagtgggcagagcgcacatcgcccacagtccccgagaagttggggggaggggtcggcaattgaaccggtgcctagagaaggtggcgcggggtaaactgggaaagtgatgtcgtgtactggctccgcctttttcccgagggtgggggagaaccgtatataagtgcagtagtcgccgtgaacgttctttttcgcaacgggtttgccgccagaacacaggatccgccaccatggccttaccagtgaccgccttgctcctgccgctggccttgctgctccacgccgccaggccggacatccagctcacccagtccccgagctcgctgtccgcctccgtgggagatcgggtcaccatcacgtgccgcgccagccagtcgatttcctcctacctgaactggtaccaacagaagcccggaaaagccccgaagcttctcatctacgccgcctcgagcctgcagtcaggagtgccctcacggttctccggctccggttccggtactgatttcaccctgaccatttcctccctgcaaccggaggacttcgctacttactactgccagcagtcgtactccaccccctacactttcggacaaggcaccaaggtcgaaatcaagggtggcggtggctcgggcggtggtgggtcgggtggcggcggatctgaagtgcaattggtggaatcagggggaggacttgtgcagcctggaggatcgctgagactgtcatgtgccgtgtccggctttgccctgtccaaccacgggatgtcctgggtccgccgcgcgcctggaaagggcctcgaatgggtgtcgggtattgtgtacagcggtagcacctactatgccgcatccgtgaaggggagattcaccatcagccgggacaactccaggaacactctgtacctccaaatgaattcgctgaggccagaggacactgccatctactactgctccgcgcatggcggagagtccgacgtctggggacaggggaccaccgtgaccgtgtctagcaccacgacgccagcgccgcgaccaccaacaccggcgcccaccatcgcgtcgcagcccctgtccctgcgcccagaggcgtgccggccagcggcggggggcgcagtgcacacgagggggctggacttcgcctgtgatatctacatctgggcgcccttggccgggacttgtggggtccttctcctgtcactggttatcaccctttactgcaaacggggcagaaagaaactcctgtatatattcaaacaaccatttatgagaccagtacaaactactcaagaggaagatggctgtagctgccgatttccagaagaagaagaaggaggatgtgaactgagagtgaagttcagcaggagcgcagacgcccccgcgtacaagcagggccagaaccagctctataacgagctcaatctaggacgaagagaggagtacgatgttttggacaagaggcgtggccgggaccctgagatggggggaaagccgagaaggaagaaccctcaggaaggcctgtacaatgaactgcagaaagataagatggcggaggcctacagtgagattgggatgaaaggcgagcgccggaggggcaaggggcacgatggcctttaccagggtctcagtacagccaccaaggacacctacgacgcccttcacatgcaggccctgccccctcgctaa

SEQ ID NO: 44 - DNA, 1689 bp, Artificial Sequence; identical to SEQ ID NO: 42
  Synthesized

SEQ ID NO: 45 - DNA, 1689 bp, Artificial Sequence; identical to SEQ ID NO: 43
  Synthesized

SEQ ID NO: 46 - protein, 106 aa, Artificial Sequence
  Synthesized
NIVMTQSPSSLSASVGDRVTITCQASQDVGTAVAWYQQKPDQSPKLLIYWTSTRHTGVPDRFTGSGSGTDFTLTISSLQPEDIATYFCHQYNSYNTFGSGTKLEIK

SEQ ID NO: 47 - protein, 120 aa, Artificial Sequence
  Synthesized
QVTLKESGPVLVKPTETLTLTCTFSGFSLSTSGMGVGWIRQAPGKGLEWVAHIWWDDDVYYNPSLKSRLTITKDASKDQVSLKLSSVTAADTAVYYCVRRRATGTGFDYWGQGTLVTVSS

SEQ ID NO: 48 - protein, 130 aa, Artificial Sequence
  Synthesized
METDTLLLWVLLLWVPGSTGDIVLTQSPALAVSLGQRATISCRASQSVSISSHDLMQWYQQKPGQQPKLLIYDAFNLASGIPVRFSGSGSGTDFTLTIDPVQADDIATYYCQQSKDDPYTFGAGTKLELK

SEQ ID NO: 49 - protein, 139 aa, Artificial Sequence
  Synthesized
MDIRLSLAFLVLFIKGVQCEVQLVESGGGLVQPGRSMKLSCAASGFTFSNYGMAWVRQAPTKGLEWVATISYDGSITYYRDSVKGRFTISRDHAKSTLYLQMNSLRSEDTATYYCTREEQYSSWYFDFWGPGIMVTVSS

SEQ ID NO: 50 - protein, 112 aa, Artificial Sequence
  Synthesized
DIVMTQSPDSLAVSLGERATINCKSSQSLLNSRTRKNYLAWYQQKPGQPPKLLIYWASTRESGVPDRFSGSGSGTDFTLTISSLQAEDVAVYYCTQSFILRTFGQGTKVEIK

SEQ ID NO: 51 - protein, 119 aa, Artificial Sequence
  Synthesized
EVQLVQSGAEVKKPGASVKVSCKASGYTFTNYYIHWVRQAPGQGLEWIGWIYPGDGNTKYNEKFKGRATLTADTSTSTAYLELSSLRSEDTAVYYCARDSYSNYYFDYWGQGTLVTVSS

SEQ ID NO: 52 - protein, 413 aa, Artificial Sequence
  Synthesized
MRPADLLQLVLLLDLPRDLGGMGCSSPPCECHQEEDFRVTCKDIQRIPSLPPSTQTLKLIETHLRTIPSHAFSNLPNISRIYVSIDVTLQQLESHSFYNLSKVTHIEIRNTRNLTYIDPDALKELPLLKFLGIFNTGLKMFPDLTKVYSTDIFFILEITDNPYMTSIPVNAFQGLCNETLTLKLYNNGFTSVQGYAFNGTKLDAVYLNKNKYLTVIDKDAFGGVYSGPSLLDVSQTSVTALPSKGLEHLKELIARNTWTLKKLPLSLSFLHLTRADLSYPSHCCAFKNQKKIRGILESLMCNESSMQSLRQRKSVNALNSPLHQEYEENLGDSIVGYKEKSKFQDTHNNAHYYVFFEEQEDEIIGFGQELKNPQEETLQAFDSHYDYTICGDSEDMVCTPKSDEFNPCEDIMG

SEQ ID NO: 53 - protein, 115 aa, Artificial Sequence
  Synthesized
EVQLLESGGGLVQPGGSLRLSCAASGFTFSSYAMNWVRQAPGKGLEWVSAILSSGGSTYYADSVKGRFTISRDNSKNTLYLQMNSLRAEDTAVYYCARYWPMDIWGQGTLVTVSS

SEQ ID NO: 54 - protein, 108 aa, Artificial Sequence
  Synthesized
EIVLTQSPGTLSLSPGERATLSCRGGQSVSSSYLAWYQQKPGQAPRLLMYDASIRATGIPDRFSGSGSGTDFTLTISRLEPEDFAVYYCQQYQSWPLTFGQGTKVEIK

SEQ ID NO: 55 - protein, 140 aa, Artificial Sequence
  Synthesized
MGWSCIILFLVATATGVHSEVQLVESGGGLMQPKGSLKLSCAASGFTFKTYALNWVRQAPGTGLEWVARIRSKSNNYTTYYADSVKDRFTISRDDSQNMLYLQMNNLKTEDTAMYYCVRPQSGTSFAYWGQGTLVTVSAA

SEQ ID NO: 56 - protein, 131 aa, Artificial Sequence
  Synthesized
MGWSCIILFLVATATGVHSNIVLTQSPASLAVSLGQRATISCRASESVDSYGNSFMHWYQQKPGQPPKLLIYLASNLESGVPARFSGSGSRTDFTLTIDPVEADDVATYYCQQNNGDPYTFGGGTKLEIIR

SEQ ID NO: 57 - protein, 120 aa, Artificial Sequence
  Synthesized
QVQLVQSGGGVVQPGKSLRLSCAASGFTFSIFAMHWVRQAPGKGLEWVATISYDGSNAFYADSVEGRFTISRDNSKDSLYLQMDSLRPEDTAVYYCVKAGDGGYDVFDSWGQGTLVTVSS

SEQ ID NO: 58 - protein, 111 aa, Artificial Sequence
  Synthesized
EIVMTQSPLSLPVTPGEPASISCRSSQSLLHSNGYNYLDWYLQKPGQSPQLLIYLGSNRASGVPDRFSGSGSGTDFTLKISRVEAEDVGVYYCMQALQTPTFGPGTKVDIK

SEQ ID NO: 59 - DNA, 1473 bp, Artificial Sequence
  Synthesized
atggccttaccagtgaccgccttgctcctgccgctggccttgctgctccacgccgccaggccggatatccagatgacccagagcccaagctccctgtccgcctctgtgggcgacagggtgaccatcacatgccgcgccagccagacaatctggtcctacctgaactggtatcagcagagacccggcaaggcccctaatctgctgatctacgcagcatctagcctgcagtctggagtgccctcccggttctctggaagaggatccggaaccgacttcaccctgacaatctcctctctgcaggccgaggacttcgccacatactattgccagcagagctattccatccctcagacctttggccagggcacaaagctggagatcaagggcggcggcggctctggaggaggaggaagcggaggaggaggatcccaggtgcagctgcagcagagcggaccaggactggtgaagccctcccagaccctgtctctgacatgtgccatcagcggcgattccgtgagctccaacagcgccgcctggaattggatccggcagtctcccagcagaggactggagtggctgggaaggacctactatcgctccaagtggtacaacgattatgccgtgtctgtgaagagccggatcaccatcaaccctgacacatctaagaatcagttcagcctgcagctgaattccgtgaccccagaggacacagccgtgtactattgtgcaagggaggtgaccggcgacctggaggatgcctttgacatctggggccagggcaccatggtgacagtgtctagcaccacgacgccagcgccgcgaccaccaacaccggcgcccaccatcgcgtcgcagcccctgtccctgcgcccagaggcgtgccggccagcggcggggggcgcagtgcacacgagggggctggacttcgcctgtgatatctacatctgggcgcccttggccgggacttgtggggtccttctcctgtcactggttatcaccctttactgcaaacggggcagaaagaaactcctgtatatattcaaacaaccatttatgagaccagtacaaactactcaagaggaagatggctgtagctgccgatttccagaagaagaagaaggaggatgtgaactgagagtgaagttcagcaggagcgcagacgcccccgcgtacaagcagggccagaaccagctctataacgagctcaatctaggacgaagagaggagtacgatgttttggacaagaggcgtggccgggaccctgagatggggggaaagccgagaaggaagaaccctcaggaaggcctgtacaatgaactgcagaaagataagatggcggaggcctacagtgagattgggatgaaaggcgagcgccggaggggcaaggggcacgatggcctttaccagggtctcagtacagccaccaaggacacctacgacgcccttcacatgcaggccctgccccctcgctaa

SEQ ID NO: 60 - DNA, 1446 bp, Artificial Sequence
  Synthesized
atggccttaccagtgaccgccttgctcctgccgctggccttgctgctccacgccgccaggccggacatccagctcacccagtccccgagctcgctgtccgcctccgtgggagatcgggtcaccatcacgtgccgcgccagccagtcgatttcctcctacctgaactggtaccaacagaagcccggaaaagccccgaagcttctcatctacgccgcctcgagcctgcagtcaggagtgccctcacggttctccggctccggttccggtactgatttcaccctgaccatttcctccctgcaaccggaggacttcgctacttactactgccagcagtcgtactccaccccctacactttcggacaaggcaccaaggtcgaaatcaagggtggcggtggctcgggcggtggtgggtcgggtggcggcggatctgaagtgcaattggtggaatcagggggaggacttgtgcagcctggaggatcgctgagactgtcatgtgccgtgtccggctttgccctgtccaaccacgggatgtcctgggtccgccgcgcgcctggaaagggcctcgaatgggtgtcgggtattgtgtacagcggtagcacctactatgccgcatccgtgaaggggagattcaccatcagccgggacaactccaggaacactctgtacctccaaatgaattcgctgaggccagaggacactgccatctactactgctccgcgcatggcggagagtccgacgtctggggacaggggaccaccgtgaccgtgtctagcaccacgacgccagcgccgcgaccaccaacaccggcgcccaccatcgcgtcgcagcccctgtccctgcgcccagaggcgtgccggccagcggcggggggcgcagtgcacacgagggggctggacttcgcctgtgatatctacatctgggcgcccttggccgggacttgtggggtccttctcctgtcactggttatcaccctttactgcaaacggggcagaaagaaactcctgtatatattcaaacaaccatttatgagaccagtacaaactactcaagaggaagatggctgtagctgccgatttccagaagaagaagaaggaggatgtgaactgagagtgaagttcagcaggagcgcagacgcccccgcgtacaagcagggccagaaccagctctataacgagctcaatctaggacgaagagaggagtacgatgttttggacaagaggcgtggccgggaccctgagatggggggaaagccgagaaggaagaaccctcaggaaggcctgtacaatgaactgcagaaagataagatggcggaggcctacagtgagattgggatgaaaggcgagcgccggaggggcaaggggcacgatggcctttaccagggtctcagtacagccaccaaggacacctacgacgcccttcacatgcaggccctgccccctcgctaa

SEQ ID NO: 61 - DNA, 1467 bp, Artificial Sequence
  Synthesized
atggccttaccagtgaccgccttgctcctgccgctggccttgctgctccacgccgccaggccggacatcgtgatgacccagtccccctccagcctgacagtgacagccggcgagaaggtgacaatgatctgtaagtccagccagagcctgctgaacagcggcgaccagaagaactacctgacctggtaccagcagaagcctggccagccccccaagctgctgatcttctgggccagcacaagggagagcggcgtgcccgacagattcacaggcagcggcagcggcaccgacttcacactgaccatttcctccgtgcaggccgaggacctcgccgtgtactactgccagaacgactactcctaccccctgacattcggcgccggcaccaaactggagctgaagggtggcggtggctcgggcggtggtgggtcgggtggcggcggatctcaggtgcagctccagcagtccgatgccgagctggtgaagcccggaagcagcgtcaagatcagctgtaaggcctccggctacaccttcacagaccacgccatccactgggtgaagcagaagcccgagcagggcctggagtggatcggccactttagccccggaaacaccgacatcaagtacaacgacaagttcaagggcaaggccaccctgaccgtggacaggagcagcagcaccgcctacatgcagctgaacagcctgacaagcgaggacagcgccgtgtacttctgcaagacctccaccttcttcttcgactactggggccagggaaccaccctgacagtgtccagcaccacgacgccagcgccgcgaccaccaacaccggcgcccaccatcgcgtcgcagcccctgtccctgcgcccagaggcgtgccggccagcggcggggggcgcagtgcacacgagggggctggacttcgcctgtgatatctacatctgggcgcccttggccgggacttgtggggtccttctcctgtcactggttatcaccctttactgcaaacggggcagaaagaaactcctgtatatattcaaacaaccatttatgagaccagtacaaactactcaagaggaagatggctgtagctgccgatttccagaagaagaagaaggaggatgtgaactgagagtgaagttcagcaggagcgcagacgcccccgcgtacaagcagggccagaaccagctctataacgagctcaatctaggacgaagagaggagtacgatgttttggacaagaggcgtggccgggaccctgagatggggggaaagccgagaaggaagaaccctcaggaaggcctgtacaatgaactgcagaaagataagatggcggaggcctacagtgagattgggatgaaaggcgagcgccggaggggcaaggggcacgatggcctttaccagggtctcagtacagccaccaaggacacctacgacgcccttcacatgcaggccctgccccctcgctaa

SEQ ID NO: 62 - DNA, 3533 bp, Artificial Sequence
  Synthesized
atggccttaccagtgaccgccttgctcctgccgctggccttgctgctccacgccgccaggccggacatccagatgacacagactacatcctccctgtctgcctctctgggagacagagtcaccatcagttgcagggcaagtcaggacattagtaaatatttaaattggtatcagcagaaaccagatggaactgttaaactcctgatctaccatacatcaagattacactcaggagtcccatcaaggttcagtggcagtgggtctggaacagattattctctcaccattagcaacctggagcaagaagatattgccacttacttttgccaacagggtaatacgcttccgtacacgttcggaggggggaccaagctggagatcacaggtggcggtggctcgggcggtggtgggtcgggtggcggcggatctgaggtgaaactgcaggagtcaggacctggcctggtggcgccctcacagagcctgtccgtcacatgcactgtctcaggggtctcattacccgactatggtgtaagctggattcgccagcctccacgaaagggtctggagtggctgggagtaatatggggtagtgaaaccacatactataattcagctctcaaatccagactgaccatcatcaaggacaactccaagagccaagttttcttaaaaatgaacagtctgcaaactgatgacacagccatttactactgtgccaaacattattactacggtggtagctatgctatggactactggggccaaggaacctcagtcaccgtctcctcaaccacgacgccagcgccgcgaccaccaacaccggcgcccaccatcgcgtcgcagcccctgtccctgcgcccagaggcgtgccggccagcggcggggggcgcagtgcacacgagggggctggacttcgcctgtgatatctacatctgggcgcccttggccgggacttgtggggtccttctcctgtcactggttatcaccctttactgcaaacggggcagaaagaaactcctgtatatattcaaacaaccatttatgagaccagtacaaactactcaagaggaagatggctgtagctgccgatttccagaagaagaagaaggaggatgtgaactgagagtgaagttcagcaggagcgcagacgcccccgcgtacaagcagggccagaaccagctctataacgagctcaatctaggacgaagagaggagtacgatgttttggacaagaggcgtggccgggaccctgagatggggggaaagccgagaaggaagaaccctcaggaaggcctgtacaatgaactgcagaaagataagatggcggaggcctacagtgagattgggatgaaaggcgagcgccggaggggcaaggggcacgatggcctttaccagggtctcagtacagccaccaaggacacctacgacgcccttcacatgcaggccctgccccctcgctaatctagaggcgcgcccctctccctcccccccccctaacgttactggccgaagccgcttggaataaggccggtgtgcgtttgtctatatgttattttccaccatattgccgtcttttggcaatgtgagggcccggaaacctggccctgtcttcttgacgagcattcctaggggtctttcccctctcgccaaaggaatgcaaggtctgttgaatgtcgtgaaggaagcagttcctctggaagcttcttgaagacaaacaacgtctgtagcgaccctttgcaggcagcggaaccccccacctggcgacaggtgcctctgcggccaaaagccacgtgtataagatacacctgcaaaggcggcacaaccccagtgccacgttgtgagttggatagttgtggaaagagtcaaatggctctcctcaagcgtattcaacaaggggctgaaggatgcccagaaggtaccccattgtatgggatctgatctggggcctcggtacacatgctttacatgtgtttagtcgaggttaaaaaaacgtctaggccccccgaaccacggggacgtggttttcctttgaaaaacacgatgataatatggccacaacccatatgatggccttaccagtgaccgccttgctcctgccgctggccttgctgctccacgccgccaggccggacatcgtgatgacccagtccccctccagcctgacagtgacagccggcgagaaggtgacaatgatctgtaagtccagccagagcctgctgaacagcggcgaccagaagaactacctgacctggtaccagcagaagcctggccagccccccaagctgctgatcttctgggccagcacaagggagagcggcgtgcccgacagattcacaggcagcggcagcggcaccgacttcacactgaccatttcctccgtgcaggccgaggacctcgccgtgtactactgccagaacgactactcctaccccctgacattcggcgccggcaccaaactggagctgaagggtggcggtggctcgggcggtggtgggtcgggtggcggcggatctcaggtgcagctccagcagtccgatgccgagctggtgaagcccggaagcagcgtcaagatcagctgtaaggcctccggctacaccttcacagaccacgccatccactgggtgaagcagaagcccgagcagggcctggagtggatcggccactttagccccggaaacaccgacatcaagtacaacgacaagttcaagggcaaggccaccctgaccgtggacaggagcagcagcaccgcctacatgcagctgaacagcctgacaagcgaggacagcgccgtgtacttctgcaagacctccaccttcttcttcgactactggggccagggaaccaccctgacagtgtccagcaccacgacgccagcgccgcgaccaccaacaccggcgcccaccatcgcgtcgcagcccctgtccctgcgcccagaggcgtgccggccagcggcggggggcgcagtgcacacgagggggctggacttcgcctgtgatatctacatctgggcgcccttggccgggacttgtggggtccttctcctgtcactggttatcaccctttactgcaaacggggcagaaagaaactcctgtatatattcaaacaaccatttatgagaccagtacaaactactcaagaggaagatggctgtagctgccgatttccagaagaagaagaaggaggatgtgaactgagagtgaagttcagcaggagcgcagacgcccccgcgtacaagcagggccagaaccagctctataacgagctcaatctaggacgaagagaggagtacgatgttttggacaagaggcgtggccgggaccctgagatggggggaaagccgagaaggaagaaccctcaggaaggcctgtacaatgaactgcagaaagataagatggcggaggcctacagtgagattgggatgaaaggcgagcgccggaggggcaaggggcacgatggcctttaccagggtctcagtacagccaccaaggacacctacgacgcccttcacatgcaggccctgccccctcgctaa

SEQ ID NO: 63 - DNA, 3533 bp, Artificial Sequence
  Synthesized
atggccttaccagtgaccgccttgctcctgccgctggccttgctgctccacgccgccaggccggatatccagatgacccagagcccgagcagcctgagcgcgagcgtgggtgatcgcgtgaccattacctgcagggcaagtcaggacattagtaaatatttaaattggtatcagcagaaaccgggtaaagcgccgaaactgttaatttatcatacatcaagattacactcaggcgtgccgtcgcgttttagcggctcgggttcgggcaccgattttaccctgaccatctcgagcttgcagccggaggacttcgccacctactattgccaacagggtaatacgcttccgtacacgttcggtcagggcaccaaagtggagatcaaaggtggcggtggctcgggcggtggtgggtcgggtggcggcggatctgaggtgcagctggtggagtctgggggaggcttggtacagcctggggggtccctgagactctcctgtgcagcctctggagtgtccctgcctgattatggcgtgtcctgggtccgccaggctccagggaaggggctggagtgggtttcagtgatctggggcagcgagacaacctactacaacagcgccctgaagtcccgattcaccatctccagagacaatgccaagaactcactgtatctgcaaatgaacagcctgagagccgaggacacggctgtgtattactgtgcgaagcactactactacggcggcagctacgctatggactactggggccaaggaaccctggtcaccgtgtcctcaaccacgacgccagcgccgcgaccaccaacaccggcgcccaccatcgcgtcgcagcccctgtccctgcgcccagaggcgtgccggccagcggcggggggcgcagtgcacacgagggggctggacttcgcctgtgatatctacatctgggcgcccttggccgggacttgtggggtccttctcctgtcactggttatcaccctttactgcaaacggggcagaaagaaactcctgtatatattcaaacaaccatttatgagaccagtacaaactactcaagaggaagatggctgtagctgccgatttccagaagaagaagaaggaggatgtgaactgagagtgaagttcagcaggagcgcagacgcccccgcgtacaagcagggccagaaccagctctataacgagctcaatctaggacgaagagaggagtacgatgttttggacaagaggcgtggccgggaccctgagatggggggaaagccgagaaggaagaaccctcaggaaggcctgtacaatgaactgcagaaagataagatggcggaggcctacagtgagattgggatgaaaggcgagcgccggaggggcaaggggcacgatggcctttaccagggtctcagtacagccaccaaggacacctacgacgcccttcacatgcaggccctgccccctcgctaatctagaggcgcgcccctctccctcccccccccctaacgttactggccgaagccgcttggaataaggccggtgtgcgtttgtctatatgttattttccaccatattgccgtcttttggcaatgtgagggcccggaaacctggccctgtcttcttgacgagcattcctaggggtctttcccctctcgccaaaggaatgcaaggtctgttgaatgtcgtgaaggaagcagttcctctggaagcttcttgaagacaaacaacgtctgtagcgaccctttgcaggcagcggaaccccccacctggcgacaggtgcctctgcggccaaaagccacgtgtataagatacacctgcaaaggcggcacaaccccagtgccacgttgtgagttggatagttgtggaaagagtcaaatggctctcctcaagcgtattcaacaaggggctgaaggatgcccagaaggtaccccattgtatgggatctgatctggggcctcggtacacatgctttacatgtgtttagtcgaggttaaaaaaacgtctaggccccccgaaccacggggacgtggttttcctttgaaaaacacgatgataatatggccacaacccatatgatggccttaccagtgaccgccttgctcctgccgctggccttgctgctccacgccgccaggccggacatcgtgatgacccagtccccctccagcctgacagtgacagccggcgagaaggtgacaatgatctgtaagtccagccagagcctgctgaacagcggcgaccagaagaactacctgacctggtaccagcagaagcctggccagccccccaagctgctgatcttctgggccagcacaagggagagcggcgtgcccgacagattcacaggcagcggcagcggcaccgacttcacactgaccatttcctccgtgcaggccgaggacctcgccgtgtactactgccagaacgactactcctaccccctgacattcggcgccggcaccaaactggagctgaagggtggcggtggctcgggcggtggtgggtcgggtggcggcggatctcaggtgcagctccagcagtccgatgccgagctggtgaagcccggaagcagcgtcaagatcagctgtaaggcctccggctacaccttcacagaccacgccatccactgggtgaagcagaagcccgagcagggcctggagtggatcggccactttagccccggaaacaccgacatcaagtacaacgacaagttcaagggcaaggccaccctgaccgtggacaggagcagcagcaccgcctacatgcagctgaacagcctgacaagcgaggacagcgccgtgtacttctgcaagacctccaccttcttcttcgactactggggccagggaaccaccctgacagtgtccagcaccacgacgccagcgccgcgaccaccaacaccggcgcccaccatcgcgtcgcagcccctgtccctgcgcccagaggcgtgccggccagcggcggggggcgcagtgcacacgagggggctggacttcgcctgtgatatctacatctgggcgcccttggccgggacttgtggggtccttctcctgtcactggttatcaccctttactgcaaacggggcagaaagaaactcctgtatatattcaaacaaccatttatgagaccagtacaaactactcaagaggaagatggctgtagctgccgatttccagaagaagaagaaggaggatgtgaactgagagtgaagttcagcaggagcgcagacgcccccgcgtacaagcagggccagaaccagctctataacgagctcaatctaggacgaagagaggagtacgatgttttggacaagaggcgtggccgggaccctgagatggggggaaagccgagaaggaagaaccctcaggaaggcctgtacaatgaactgcagaaagataagatggcggaggcctacagtgagattgggatgaaaggcgagcgccggaggggcaaggggcacgatggcctttaccagggtctcagtacagccaccaaggacacctacgacgcccttcacatgcaggccctgccccctcgctaa

SEQ ID NO: 64 - DNA, 3545 bp, Artificial Sequence
  Synthesized
atggccttaccagtgaccgccttgctcctgccgctggccttgctgctccacgccgccaggccggatatccagatgacccagagcccaagctccctgtccgcctctgtgggcgacagggtgaccatcacatgccgcgccagccagacaatctggtcctacctgaactggtatcagcagagacccggcaaggcccctaatctgctgatctacgcagcatctagcctgcagtctggagtgccctcccggttctctggaagaggatccggaaccgacttcaccctgacaatctcctctctgcaggccgaggacttcgccacatactattgccagcagagctattccatccctcagacctttggccagggcacaaagctggagatcaagggcggcggcggctctggaggaggaggaagcggaggaggaggatcccaggtgcagctgcagcagagcggaccaggactggtgaagccctcccagaccctgtctctgacatgtgccatcagcggcgattccgtgagctccaacagcgccgcctggaattggatccggcagtctcccagcagaggactggagtggctgggaaggacctactatcgctccaagtggtacaacgattatgccgtgtctgtgaagagccggatcaccatcaaccctgacacatctaagaatcagttcagcctgcagctgaattccgtgaccccagaggacacagccgtgtactattgtgcaagggaggtgaccggcgacctggaggatgcctttgacatctggggccagggcaccatggtgacagtgtctagcaccacgacgccagcgccgcgaccaccaacaccggcgcccaccatcgcgtcgcagcccctgtccctgcgcccagaggcgtgccggccagcggcggggggcgcagtgcacacgagggggctggacttcgcctgtgatatctacatctgggcgcccttggccgggacttgtggggtccttctcctgtcactggttatcaccctttactgcaaacggggcagaaagaaactcctgtatatattcaaacaaccatttatgagaccagtacaaactactcaagaggaagatggctgtagctgccgatttccagaagaagaagaaggaggatgtgaactgagagtgaagttcagcaggagcgcagacgcccccgcgtacaagcagggccagaaccagctctataacgagctcaatctaggacgaagagaggagtacgatgttttggacaagaggcgtggccgggaccctgagatggggggaaagccgagaaggaagaaccctcaggaaggcctgtacaatgaactgcagaaagataagatggcggaggcctacagtgagattgggatgaaaggcgagcgccggaggggcaaggggcacgatggcctttaccagggtctcagtacagccaccaaggacacctacgacgcccttcacatgcaggccctgccccctcgctaatctagaggcgcgcccctctccctcccccccccctaacgttactggccgaagccgcttggaataaggccggtgtgcgtttgtctatatgttattttccaccatattgccgtcttttggcaatgtgagggcccggaaacctggccctgtcttcttgacgagcattcctaggggtctttcccctctcgccaaaggaatgcaaggtctgttgaatgtcgtgaaggaagcagttcctctggaagcttcttgaagacaaacaacgtctgtagcgaccctttgcaggcagcggaaccccccacctggcgacaggtgcctctgcggccaaaagccacgtgtataagatacacctgcaaaggcggcacaaccccagtgccacgttgtgagttggatagttgtggaaagagtcaaatggctctcctcaagcgtattcaacaaggggctgaaggatgcccagaaggtaccccattgtatgggatctgatctggggcctcggtacacatgctttacatgtgtttagtcgaggttaaaaaaacgtctaggccccccgaaccacggggacgtggttttcctttgaaaaacacgatgataatatggccacaacccatatgatggccttaccagtgaccgccttgctcctgccgctggccttgctgctccacgccgccaggccggacatcgtgatgacccagtccccctccagcctgacagtgacagccggcgagaaggtgacaatgatctgtaagtccagccagagcctgctgaacagcggcgaccagaagaactacctgacctggtaccagcagaagcctggccagccccccaagctgctgatcttctgggccagcacaagggagagcggcgtgcccgacagattcacaggcagcggcagcggcaccgacttcacactgaccatttcctccgtgcaggccgaggacctcgccgtgtactactgccagaacgactactcctaccccctgacattcggcgccggcaccaaactggagctgaagggtggcggtggctcgggcggtggtgggtcgggtggcggcggatctcaggtgcagctccagcagtccgatgccgagctggtgaagcccggaagcagcgtcaagatcagctgtaaggcctccggctacaccttcacagaccacgccatccactgggtgaagcagaagcccgagcagggcctggagtggatcggccactttagccccggaaacaccgacatcaagtacaacgacaagttcaagggcaaggccaccctgaccgtggacaggagcagcagcaccgcctacatgcagctgaacagcctgacaagcgaggacagcgccgtgtacttctgcaagacctccaccttcttcttcgactactggggccagggaaccaccctgacagtgtccagcaccacgacgccagcgccgcgaccaccaacaccggcgcccaccatcgcgtcgcagcccctgtccctgcgcccagaggcgtgccggccagcggcggggggcgcagtgcacacgagggggctggacttcgcctgtgatatctacatctgggcgcccttggccgggacttgtggggtccttctcctgtcactggttatcaccctttactgcaaacggggcagaaagaaactcctgtatatattcaaacaaccatttatgagaccagtacaaactactcaagaggaagatggctgtagctgccgatttccagaagaagaagaaggaggatgtgaactgagagtgaagttcagcaggagcgcagacgcccccgcgtacaagcagggccagaaccagctctataacgagctcaatctaggacgaagagaggagtacgatgttttggacaagaggcgtggccgggaccctgagatggggggaaagccgagaaggaagaaccctcaggaaggcctgtacaatgaactgcagaaagataagatggcggaggcctacagtgagattgggatgaaaggcgagcgccggaggggcaaggggcacgatggcctttaccagggtctcagtacagccaccaaggacacctacgacgcccttcacatgcaggccctgccccctcgctaa

SEQ ID NO: 65 - DNA, 3518 bp, Artificial Sequence
  Synthesized
atggccttaccagtgaccgccttgctcctgccgctggccttgctgctccacgccgccaggccggacatccagctcacccagtccccgagctcgctgtccgcctccgtgggagatcgggtcaccatcacgtgccgcgccagccagtcgatttcctcctacctgaactggtaccaacagaagcccggaaaagccccgaagcttctcatctacgccgcctcgagcctgcagtcaggagtgccctcacggttctccggctccggttccggtactgatttcaccctgaccatttcctccctgcaaccggaggacttcgctacttactactgccagcagtcgtactccaccccctacactttcggacaaggcaccaaggtcgaaatcaagggtggcggtggctcgggcggtggtgggtcgggtggcggcggatctgaagtgcaattggtggaatcagggggaggacttgtgcagcctggaggatcgctgagactgtcatgtgccgtgtccggctttgccctgtccaaccacgggatgtcctgggtccgccgcgcgcctggaaagggcctcgaatgggtgtcgggtattgtgtacagcggtagcacctactatgccgcatccgtgaaggggagattcaccatcagccgggacaactccaggaacactctgtacctccaaatgaattcgctgaggccagaggacactgccatctactactgctccgcgcatggcggagagtccgacgtctggggacaggggaccaccgtgaccgtgtctagcaccacgacgccagcgccgcgaccaccaacaccggcgcccaccatcgcgtcgcagcccctgtccctgcgcccagaggcgtgccggccagcggcggggggcgcagtgcacacgagggggctggacttcgcctgtgatatctacatctgggcgcccttggccgggacttgtggggtccttctcctgtcactggttatcaccctttactgcaaacggggcagaaagaaactcctgtatatattcaaacaaccatttatgagaccagtacaaactactcaagaggaagatggctgtagctgccgatttccagaagaagaagaaggaggatgtgaactgagagtgaagttcagcaggagcgcagacgcccccgcgtacaagcagggccagaaccagctctataacgagctcaatctaggacgaagagaggagtacgatgttttggacaagaggcgtggccgggaccctgagatggggggaaagccgagaaggaagaaccctcaggaaggcctgtacaatgaactgcagaaagataagatggcggaggcctacagtgagattgggatgaaaggcgagcgccggaggggcaaggggcacgatggcctttaccagggtctcagtacagccaccaaggacacctacgacgcccttcacatgcaggccctgccccctcgctaatctagaggcgcgcccctctccctcccccccccctaacgttactggccgaagccgcttggaataaggccggtgtgcgtttgtctatatgttattttccaccatattgccgtcttttggcaatgtgagggcccggaaacctggccctgtcttcttgacgagcattcctaggggtctttcccctctcgccaaaggaatgcaaggtctgttgaatgtcgtgaaggaagcagttcctctggaagcttcttgaagacaaacaacgtctgtagcgaccctttgcaggcagcggaaccccccacctggcgacaggtgcctctgcggccaaaagccacgtgtataagatacacctgcaaaggcggcacaaccccagtgccacgttgtgagttggatagttgtggaaagagtcaaatggctctcctcaagcgtattcaacaaggggctgaaggatgcccagaaggtaccccattgtatgggatctgatctggggcctcggtacacatgctttacatgtgtttagtcgaggttaaaaaaacgtctaggccccccgaaccacggggacgtggttttcctttgaaaaacacgatgataatatggccacaacccatatgatggccttaccagtgaccgccttgctcctgccgctggccttgctgctccacgccgccaggccggacatcgtgatgacccagtccccctccagcctgacagtgacagccggcgagaaggtgacaatgatctgtaagtccagccagagcctgctgaacagcggcgaccagaagaactacctgacctggtaccagcagaagcctggccagccccccaagctgctgatcttctgggccagcacaagggagagcggcgtgcccgacagattcacaggcagcggcagcggcaccgacttcacactgaccatttcctccgtgcaggccgaggacctcgccgtgtactactgccagaacgactactcctaccccctgacattcggcgccggcaccaaactggagctgaagggtggcggtggctcgggcggtggtgggtcgggtggcggcggatctcaggtgcagctccagcagtccgatgccgagctggtgaagcccggaagcagcgtcaagatcagctgtaaggcctccggctacaccttcacagaccacgccatccactgggtgaagcagaagcccgagcagggcctggagtggatcggccactttagccccggaaacaccgacatcaagtacaacgacaagttcaagggcaaggccaccctgaccgtggacaggagcagcagcaccgcctacatgcagctgaacagcctgacaagcgaggacagcgccgtgtacttctgcaagacctccaccttcttcttcgactactggggccagggaaccaccctgacagtgtccagcaccacgacgccagcgccgcgaccaccaacaccggcgcccaccatcgcgtcgcagcccctgtccctgcgcccagaggcgtgccggccagcggcggggggcgcagtgcacacgagggggctggacttcgcctgtgatatctacatctgggcgcccttggccgggacttgtggggtccttctcctgtcactggttatcaccctttactgcaaacggggcagaaagaaactcctgtatatattcaaacaaccatttatgagaccagtacaaactactcaagaggaagatggctgtagctgccgatttccagaagaagaagaaggaggatgtgaactgagagtgaagttcagcaggagcgcagacgcccccgcgtacaagcagggccagaaccagctctataacgagctcaatctaggacgaagagaggagtacgatgttttggacaagaggcgtggccgggaccctgagatggggggaaagccgagaaggaagaaccctcaggaaggcctgtacaatgaactgcagaaagataagatggcggaggcctacagtgagattgggatgaaaggcgagcgccggaggggcaaggggcacgatggcctttaccagggtctcagtacagccaccaaggacacctacgacgcccttcacatgcaggccctgccccctcgctaa

SEQ ID NO: 66 - DNA, 2994 bp, Artificial Sequence
  Synthesized
atggccttaccagtgaccgccttgctcctgccgctggccttgctgctccacgccgccaggccggacatccagatgacacagactacatcctccctgtctgcctctctgggagacagagtcaccatcagttgcagggcaagtcaggacattagtaaatatttaaattggtatcagcagaaaccagatggaactgttaaactcctgatctaccatacatcaagattacactcaggagtcccatcaaggttcagtggcagtgggtctggaacagattattctctcaccattagcaacctggagcaagaagatattgccacttacttttgccaacagggtaatacgcttccgtacacgttcggaggggggaccaagctggagatcacaggtggcggtggctcgggcggtggtgggtcgggtggcggcggatctgaggtgaaactgcaggagtcaggacctggcctggtggcgccctcacagagcctgtccgtcacatgcactgtctcaggggtctcattacccgactatggtgtaagctggattcgccagcctccacgaaagggtctggagtggctgggagtaatatggggtagtgaaaccacatactataattcagctctcaaatccagactgaccatcatcaaggacaactccaagagccaagttttcttaaaaatgaacagtctgcaaactgatgacacagccatttactactgtgccaaacattattactacggtggtagctatgctatggactactggggccaaggaacctcagtcaccgtctcctcaaccacgacgccagcgccgcgaccaccaacaccggcgcccaccatcgcgtcgcagcccctgtccctgcgcccagaggcgtgccggccagcggcggggggcgcagtgcacacgagggggctggacttcgcctgtgatatctacatctgggcgcccttggccgggacttgtggggtccttctcctgtcactggttatcaccctttactgcaaacggggcagaaagaaactcctgtatatattcaaacaaccatttatgagaccagtacaaactactcaagaggaagatggctgtagctgccgatttccagaagaagaagaaggaggatgtgaactgagagtgaagttcagcaggagcgcagacgcccccgcgtacaagcagggccagaaccagctctataacgagctcaatctaggacgaagagaggagtacgatgttttggacaagaggcgtggccgggaccctgagatggggggaaagccgagaaggaagaaccctcaggaaggcctgtacaatgaactgcagaaagataagatggcggaggcctacagtgagattgggatgaaaggcgagcgccggaggggcaaggggcacgatggcctttaccagggtctcagtacagccaccaaggacacctacgacgcccttcacatgcaggccctgccccctcgctctagagccacgaacttctctctgttaaagcaagcaggagacgtggaagaaaaccccggtcctcatatgatggccttaccagtgaccgccttgctcctgccgctggccttgctgctccacgccgccaggccggacatcgtgatgacccagtccccctccagcctgacagtgacagccggcgagaaggtgacaatgatctgtaagtccagccagagcctgctgaacagcggcgaccagaagaactacctgacctggtaccagcagaagcctggccagccccccaagctgctgatcttctgggccagcacaagggagagcggcgtgcccgacagattcacaggcagcggcagcggcaccgacttcacactgaccatttcctccgtgcaggccgaggacctcgccgtgtactactgccagaacgactactcctaccccctgacattcggcgccggcaccaaactggagctgaagggtggcggtggctcgggcggtggtgggtcgggtggcggcggatctcaggtgcagctccagcagtccgatgccgagctggtgaagcccggaagcagcgtcaagatcagctgtaaggcctccggctacaccttcacagaccacgccatccactgggtgaagcagaagcccgagcagggcctggagtggatcggccactttagccccggaaacaccgacatcaagtacaacgacaagttcaagggcaaggccaccctgaccgtggacaggagcagcagcaccgcctacatgcagctgaacagcctgacaagcgaggacagcgccgtgtacttctgcaagacctccaccttcttcttcgactactggggccagggaaccaccctgacagtgtccagcaccacgacgccagcgccgcgaccaccaacaccggcgcccaccatcgcgtcgcagcccctgtccctgcgcccagaggcgtgccggccagcggcggggggcgcagtgcacacgagggggctggacttcgcctgtgatatctacatctgggcgcccttggccgggacttgtggggtccttctcctgtcactggttatcaccctttactgcaaacggggcagaaagaaactcctgtatatattcaaacaaccatttatgagaccagtacaaactactcaagaggaagatggctgtagctgccgatttccagaagaagaagaaggaggatgtgaactgagagtgaagttcagcaggagcgcagacgcccccgcgtacaagcagggccagaaccagctctataacgagctcaatctaggacgaagagaggagtacgatgttttggacaagaggcgtggccgggaccctgagatggggggaaagccgagaaggaagaaccctcaggaaggcctgtacaatgaactgcagaaagataagatggcggaggcctacagtgagattgggatgaaaggcgagcgccggaggggcaaggggcacgatggcctttaccagggtctcagtacagccaccaaggacacctacgacgcccttcacatgcaggccctgccccctcgctaa

SEQ ID NO: 67 - DNA, 2994 bp, Artificial Sequence
  Synthesized
atggccttaccagtgaccgccttgctcctgccgctggccttgctgctccacgccgccaggccggatatccagatgacccagagcccgagcagcctgagcgcgagcgtgggtgatcgcgtgaccattacctgcagggcaagtcaggacattagtaaatatttaaattggtatcagcagaaaccgggtaaagcgccgaaactgttaatttatcatacatcaagattacactcaggcgtgccgtcgcgttttagcggctcgggttcgggcaccgattttaccctgaccatctcgagcttgcagccggaggacttcgccacctactattgccaacagggtaatacgcttccgtacacgttcggtcagggcaccaaagtggagatcaaaggtggcggtggctcgggcggtggtgggtcgggtggcggcggatctgaggtgcagctggtggagtctgggggaggcttggtacagcctggggggtccctgagactctcctgtgcagcctctggagtgtccctgcctgattatggcgtgtcctgggtccgccaggctccagggaaggggctggagtgggtttcagtgatctggggcagcgagacaacctactacaacagcgccctgaagtcccgattcaccatctccagagacaatgccaagaactcactgtatctgcaaatgaacagcctgagagccgaggacacggctgtgtattactgtgcgaagcactactactacggcggcagctacgctatggactactggggccaaggaaccctggtcaccgtgtcctcaaccacgacgccagcgccgcgaccaccaacaccggcgcccaccatcgcgtcgcagcccctgtccctgcgcccagaggcgtgccggccagcggcggggggcgcagtgcacacgagggggctggacttcgcctgtgatatctacatctgggcgcccttggccgggacttgtggggtccttctcctgtcactggttatcaccctttactgcaaacggggcagaaagaaactcctgtatatattcaaacaaccatttatgagaccagtacaaactactcaagaggaagatggctgtagctgccgatttccagaagaagaagaaggaggatgtgaactgagagtgaagttcagcaggagcgcagacgcccccgcgtacaagcagggccagaaccagctctataacgagctcaatctaggacgaagagaggagtacgatgttttggacaagaggcgtggccgggaccctgagatggggggaaagccgagaaggaagaaccctcaggaaggcctgtacaatgaactgcagaaagataagatggcggaggcctacagtgagattgggatgaaaggcgagcgccggaggggcaaggggcacgatggcctttaccagggtctcagtacagccaccaaggacacctacgacgcccttcacatgcaggccctgccccctcgctctagagccacgaacttctctctgttaaagcaagcaggagacgtggaagaaaaccccggtcctcatatgatggccttaccagtgaccgccttgctcctgccgctggccttgctgctccacgccgccaggccggacatcgtgatgacccagtccccctccagcctgacagtgacagccggcgagaaggtgacaatgatctgtaagtccagccagagcctgctgaacagcggcgaccagaagaactacctgacctggtaccagcagaagcctggccagccccccaagctgctgatcttctgggccagcacaagggagagcggcgtgcccgacagattcacaggcagcggcagcggcaccgacttcacactgaccatttcctccgtgcaggccgaggacctcgccgtgtactactgccagaacgactactcctaccccctgacattcggcgccggcaccaaactggagctgaagggtggcggtggctcgggcggtggtgggtcgggtggcggcggatctcaggtgcagctccagcagtccgatgccgagctggtgaagcccggaagcagcgtcaagatcagctgtaaggcctccggctacaccttcacagaccacgccatccactgggtgaagcagaagcccgagcagggcctggagtggatcggccactttagccccggaaacaccgacatcaagtacaacgacaagttcaagggcaaggccaccctgaccgtggacaggagcagcagcaccgcctacatgcagctgaacagcctgacaagcgaggacagcgccgtgtacttctgcaagacctccaccttcttcttcgactactggggccagggaaccaccctgacagtgtccagcaccacgacgccagcgccgcgaccaccaacaccggcgcccaccatcgcgtcgcagcccctgtccctgcgcccagaggcgtgccggccagcggcggggggcgcagtgcacacgagggggctggacttcgcctgtgatatctacatctgggcgcccttggccgggacttgtggggtccttctcctgtcactggttatcaccctttactgcaaacggggcagaaagaaactcctgtatatattcaaacaaccatttatgagaccagtacaaactactcaagaggaagatggctgtagctgccgatttccagaagaagaagaaggaggatgtgaactgagagtgaagttcagcaggagcgcagacgcccccgcgtacaagcagggccagaaccagctctataacgagctcaatctaggacgaagagaggagtacgatgttttggacaagaggcgtggccgggaccctgagatggggggaaagccgagaaggaagaaccctcaggaaggcctgtacaatgaactgcagaaagataagatggcggaggcctacagtgagattgggatgaaaggcgagcgccggaggggcaaggggcacgatggcctttaccagggtctcagtacagccaccaaggacacctacgacgcccttcacatgcaggccctgccccctcgctaa

SEQ ID NO: 68 - DNA, 3009 bp, Artificial Sequence
  Synthesized
atggccttaccagtgaccgccttgctcctgccgctggccttgctgctccacgccgccaggccggatatccagatgacccagagcccaagctccctgtccgcctctgtgggcgacagggtgaccatcacatgccgcgccagccagacaatctggtcctacctgaactggtatcagcagagacccggcaaggcccctaatctgctgatctacgcagcatctagcctgcagtctggagtgccctcccggttctctggaagaggatccggaaccgacttcaccctgacaatctcctctctgcaggccgaggacttcgccacatactattgccagcagagctattccatccctcagacctttggccagggcacaaagctggagatcaagggcggcggcggctctggaggaggaggaagcggaggaggaggatcccaggtgcagctgcagcagagcggaccaggactggtgaagccctcccagaccctgtctctgacatgtgccatcagcggcgattccgtgagctccaacagcgccgcctggaattggatccggcagtctcccagcagaggactggagtggctgggaaggacctactatcgctccaagtggtacaacgattatgccgtgtctgtgaagagccggatcaccatcaaccctgacacatctaagaatcagttcagcctgcagctgaattccgtgaccccagaggacacagccgtgtactattgtgcaagggaggtgaccggcgacctggaggatgcctttgacatctggggccagggcaccatggtgacagtgtctagcaccacgacgccagcgccgcgaccaccaacaccggcgcccaccatcgcgtcgcagcccctgtccctgcgcccagaggcgtgccggccagcggcggggggcgcagtgcacacgagggggctggacttcgcctgtgatatctacatctgggcgcccttggccgggacttgtggggtccttctcctgtcactggttatcaccctttactgcaaacggggcagaaagaaactcctgtatatattcaaacaaccatttatgagaccagtacaaactactcaagaggaagatggctgtagctgccgatttccagaagaagaagaaggaggatgtgaactgagagtgaagttcagcaggagcgcagacgcccccgcgtacaagcagggccagaaccagctctataacgagctcaatctaggacgaagagaggagtacgatgttttggacaagaggcgtggccgggaccctgagatggggggaaagccgagaaggaagaaccctcaggaaggcctgtacaatgaactgcagaaagataagatggcggaggcctacagtgagattgggatgaaaggcgagcgccggaggggcaaggggcacgatggcctttaccagggtctcagtacagccaccaaggacacctacgacgcccttcacatgcaggccctgccccctcgctaatctagagccacgaacttctctctgttaaagcaagcaggagacgtggaagaaaaccccggtcctcatatgatggccttaccagtgaccgccttgctcctgccgctggccttgctgctccacgccgccaggccggacatcgtgatgacccagtccccctccagcctgacagtgacagccggcgagaaggtgacaatgatctgtaagtccagccagagcctgctgaacagcggcgaccagaagaactacctgacctggtaccagcagaagcctggccagccccccaagctgctgatcttctgggccagcacaagggagagcggcgtgcccgacagattcacaggcagcggcagcggcaccgacttcacactgaccatttcctccgtgcaggccgaggacctcgccgtgtactactgccagaacgactactcctaccccctgacattcggcgccggcaccaaactggagctgaagggtggcggtggctcgggcggtggtgggtcgggtggcggcggatctcaggtgcagctccagcagtccgatgccgagctggtgaagcccggaagcagcgtcaagatcagctgtaaggcctccggctacaccttcacagaccacgccatccactgggtgaagcagaagcccgagcagggcctggagtggatcggccactttagccccggaaacaccgacatcaagtacaacgacaagttcaagggcaaggccaccctgaccgtggacaggagcagcagcaccgcctacatgcagctgaacagcctgacaagcgaggacagcgccgtgtacttctgcaagacctccaccttcttcttcgactactggggccagggaaccaccctgacagtgtccagcaccacgacgccagcgccgcgaccaccaacaccggcgcccaccatcgcgtcgcagcccctgtccctgcgcccagaggcgtgccggccagcggcggggggcgcagtgcacacgagggggctggacttcgcctgtgatatctacatctgggcgcccttggccgggacttgtggggtccttctcctgtcactggttatcaccctttactgcaaacggggcagaaagaaactcctgtatatattcaaacaaccatttatgagaccagtacaaactactcaagaggaagatggctgtagctgccgatttccagaagaagaagaaggaggatgtgaactgagagtgaagttcagcaggagcgcagacgcccccgcgtacaagcagggccagaaccagctctataacgagctcaatctaggacgaagagaggagtacgatgttttggacaagaggcgtggccgggaccctgagatggggggaaagccgagaaggaagaaccctcaggaaggcctgtacaatgaactgcagaaagataagatggcggaggcctacagtgagattgggatgaaaggcgagcgccggaggggcaaggggcacgatggcctttaccagggtctcagtacagccaccaaggacacctacgacgcccttcacatgcaggccctgccccctcgctaa

SEQ ID NO: 69 - DNA, 2982 bp, Artificial Sequence
  Synthesized
atggccttaccagtgaccgccttgctcctgccgctggccttgctgctccacgccgccaggccggacatccagctcacccagtccccgagctcgctgtccgcctccgtgggagatcgggtcaccatcacgtgccgcgccagccagtcgatttcctcctacctgaactggtaccaacagaagcccggaaaagccccgaagcttctcatctacgccgcctcgagcctgcagtcaggagtgccctcacggttctccggctccggttccggtactgatttcaccctgaccatttcctccctgcaaccggaggacttcgctacttactactgccagcagtcgtactccaccccctacactttcggacaaggcaccaaggtcgaaatcaagggtggcggtggctcgggcggtggtgggtcgggtggcggcggatctgaagtgcaattggtggaatcagggggaggacttgtgcagcctggaggatcgctgagactgtcatgtgccgtgtccggctttgccctgtccaaccacgggatgtcctgggtccgccgcgcgcctggaaagggcctcgaatgggtgtcgggtattgtgtacagcggtagcacctactatgccgcatccgtgaaggggagattcaccatcagccgggacaactccaggaacactctgtacctccaaatgaattcgctgaggccagaggacactgccatctactactgctccgcgcatggcggagagtccgacgtctggggacaggggaccaccgtgaccgtgtctagcaccacgacgccagcgccgcgaccaccaacaccggcgcccaccatcgcgtcgcagcccctgtccctgcgcccagaggcgtgccggccagcggcggggggcgcagtgcacacgagggggctggacttcgcctgtgatatctacatctgggcgcccttggccgggacttgtggggtccttctcctgtcactggttatcaccctttactgcaaacggggcagaaagaaactcctgtatatattcaaacaaccatttatgagaccagtacaaactactcaagaggaagatggctgtagctgccgatttccagaagaagaagaaggaggatgtgaactgagagtgaagttcagcaggagcgcagacgcccccgcgtacaagcagggccagaaccagctctataacgagctcaatctaggacgaagagaggagtacgatgttttggacaagaggcgtggccgggaccctgagatggggggaaagccgagaaggaagaaccctcaggaaggcctgtacaatgaactgcagaaagataagatggcggaggcctacagtgagattgggatgaaaggcgagcgccggaggggcaaggggcacgatggcctttaccagggtctcagtacagccaccaaggacacctacgacgcccttcacatgcaggccctgccccctcgctaatctagagccacgaacttctctctgttaaagcaagcaggagacgtggaagaaaaccccggtcctcatatgatggccttaccagtgaccgccttgctcctgccgctggccttgctgctccacgccgccaggccggacatcgtgatgacccagtccccctccagcctgacagtgacagccggcgagaaggtgacaatgatctgtaagtccagccagagcctgctgaacagcggcgaccagaagaactacctgacctggtaccagcagaagcctggccagccccccaagctgctgatcttctgggccagcacaagggagagcggcgtgcccgacagattcacaggcagcggcagcggcaccgacttcacactgaccatttcctccgtgcaggccgaggacctcgccgtgtactactgccagaacgactactcctaccccctgacattcggcgccggcaccaaactggagctgaagggtggcggtggctcgggcggtggtgggtcgggtggcggcggatctcaggtgcagctccagcagtccgatgccgagctggtgaagcccggaagcagcgtcaagatcagctgtaaggcctccggctacaccttcacagaccacgccatccactgggtgaagcagaagcccgagcagggcctggagtggatcggccactttagccccggaaacaccgacatcaagtacaacgacaagttcaagggcaaggccaccctgaccgtggacaggagcagcagcaccgcctacatgcagctgaacagcctgacaagcgaggacagcgccgtgtacttctgcaagacctccaccttcttcttcgactactggggccagggaaccaccctgacagtgtccagcaccacgacgccagcgccgcgaccaccaacaccggcgcccaccatcgcgtcgcagcccctgtccctgcgcccagaggcgtgccggccagcggcggggggcgcagtgcacacgagggggctggacttcgcctgtgatatctacatctgggcgcccttggccgggacttgtggggtccttctcctgtcactggttatcaccctttactgcaaacggggcagaaagaaactcctgtatatattcaaacaaccatttatgagaccagtacaaactactcaagaggaagatggctgtagctgccgatttccagaagaagaagaaggaggatgtgaactgagagtgaagttcagcaggagcgcagacgcccccgcgtacaagcagggccagaaccagctctataacgagctcaatctaggacgaagagaggagtacgatgttttggacaagaggcgtggccgggaccctgagatggggggaaagccgagaaggaagaaccctcaggaaggcctgtacaatgaactgcagaaagataagatggcggaggcctacagtgagattgggatgaaaggcgagcgccggaggggcaaggggcacgatggcctttaccagggtctcagtacagccaccaaggacacctacgacgcccttcacatgcaggccctgccccctcgctaa

SEQ ID NO: 70 - protein, 244 aa, Artificial Sequence
  Synthesized
DIVMTQSPSSLTVTAGEKVTMICKSSQSLLNSGDQKNYLTWYQQKPGQPPKLLIFWASTRESGVPDRFTGSGSGTDFTLTISSVQAEDLAVYYCQNDYSYPLTFGAGTKLELKGGGGSGGGGSGGGGSQVQLQQSDAELVKPGSSVKISCKASGYTFTDHAIHWVKQKPEQGLEWIGHFSPGNTDIKYNDKFKGKATLTVDRSSSTAYMQLNSLTSEDSAVYFCKTSTFFFDYWGQGTTLTVSS

SEQ ID NO: 71 - protein, 116 aa, Artificial Sequence
  Synthesized
QVQLQQSDAELVKPGSSVKISCKASGYTFTDHAIHWVKQKPEQGLEWIGHFSPGNTDIKYNDKFKGKATLTVDRSSSTAYMQLNSLTSEDSAVYFCKTSTFFFDYWGQGTTLTVSS

SEQ ID NO: 72 - protein, 113 aa, Artificial Sequence
  Synthesized
DIVMTQSPSSLTVTAGEKVTMICKSSQSLLNSGDQKNYLTWYQQKPGQPPKLLIFWASTRESGVPDRFTGSGSGTDFTLTISSVQAEDLAVYYCQNDYSYPLTFGAGTKLELK

SEQ ID NO: 73 - protein, 12 aa, Artificial Sequence
  Synthesized
QSLLNSGDQKNY

SEQ ID NO: 74 - protein, 107 aa, Artificial Sequence
  Synthesized
DIQMTQSPSSLSASVGDRVTITCRASQDISKYLNWYQQKPGKAPKLLIYHTSRLHSGVPSRFSGSGSGTDFTLTISSLQPEDFATYYCQQGNTLPYTFGQGTKVEIK

SEQ ID NO: 75 - protein, 9 aa, Artificial Sequence
  Synthesized
QNDYSYPLT

SEQ ID NO: 76 - protein, 8 aa, Artificial Sequence
  Synthesized
GYTFTDHA

SEQ ID NO: 77 - protein, 8 aa, Artificial Sequence
  Synthesized
FSPGNTDI

SEQ ID NO: 78 - protein, 9 aa, Artificial Sequence
  Synthesized
KTSTFFFDY

SEQ ID NO: 79 - protein, 246 aa, Artificial Sequence
  Synthesized
DIVMTQAAFSNPVTLGTSASISCRSSKSLLHSNGITYFFWYLQKPGLSPQLLIYQMSNLASGVPDRFSSSGSGTDFTLRISRVEAEDVGVYYCAQNLELPPTFGGGTKLEIKRAGGGGSGGGGSGGGGSEVKLVESGGGLVQPGGSMKLSCVASGFTFSNYWMNWVRQSPEKGLEWVAEIRLKSNNYTTHYAESVKGRFTISRDDSKSSVSLQMNNLRVEDTGIYYCTRHYYFDYWGQGTTLTVSS

SEQ ID NO: 80 - protein, 117 aa, Artificial Sequence
  Synthesized
EVKLVESGGGLVQPGGSMKLSCVASGFTFSNYWMNWVRQSPEKGLEWVAEIRLKSNNYTTHYAESVKGRFTISRDDSKSSVSLQMNNLRVEDTGIYYCTRHYYFDYWGQGTTLTVSS

SEQ ID NO: 81 - protein, 114 aa, Artificial Sequence
  Synthesized
DIVMTQAAFSNPVTLGTSASISCRSSKSLLHSNGITYFFWYLQKPGLSPQLLIYQMSNLASGVPDRFSSSGSGTDFTLRISRVEAEDVGVYYCAQNLELPPTFGGGTKLEIKRA

SEQ ID NO: 82 - protein, 16 aa, Artificial Sequence
  Synthesized
RSSKSLLHSNGITYFF

SEQ ID NO: 83 - protein, 7 aa, Artificial Sequence
  Synthesized
QMSNLAS

SEQ ID NO: 84 - protein, 9 aa, Artificial Sequence
  Synthesized
AQNLELPPT

SEQ ID NO: 85 - protein, 5 aa, Artificial Sequence
  Synthesized
NYWMN

SEQ ID NO: 86 - protein, 19 aa, Artificial Sequence
  Synthesized
EIRLKSNNYTTHYAESVKG

SEQ ID NO: 87 - protein, 6 aa, Artificial Sequence
  Synthesized
HYYFDY

SEQ ID NO: 88 - protein, 4 aa, Artificial Sequence
  Synthesized
GSTA

SEQ ID NO: 89 - protein, 97 aa, Artificial Sequence
  Synthesized
CSRAARGTIGARRTGQPLKEDPSAVPVFSVDAGELDFQWREKTPEPPVPCVPEQTEAATIVFPSGMGTSSPARRGSADGPRSAQPLRPEDGHCSWPL

SEQ ID NO: 90 - protein, 17 aa, Artificial Sequence
  Synthesized
CSRAARGTIDGHCSWPL

SEQ ID NO: 91 - protein, 21 aa, Artificial Sequence
  Synthesized
VGVVGGLLGSLVLLVWVLAVI

SEQ ID NO: 92 - protein, 18 aa, Artificial Sequence
  Synthesized
GNILNVSIKICLTLSPST

SEQ ID NO: 93 - protein, 9 aa, Artificial Sequence
  Synthesized
CSRAARGTI

SEQ ID NO: 94 - protein, 80 aa, Artificial Sequence
  Synthesized
GARRTGQPLKEDPSAVPVFSVDYGELDFQWREKTPEPPVPCVPEQTEYATIVFPSGMGTSSPARRGSADGPRSAQPLRPE

SEQ ID NO: 95 - protein, 80 aa, Artificial Sequence; identical to SEQ ID NO: 94
  Synthesized

SEQ ID NO: 96 - protein, 196 aa, Artificial Sequence
  Synthesized
QLVKSELEEKKSELRHKLKYVPHEYIELIEIARNSTQDRILEMKVMEFFMKVYGYRGKHLGGSRKPDGAIYTVGSPIDYGVIVDTKAYSGGYNLPIGQADEMQRYVEENQTRNKHINPNEWWKVYPSSVTEFKFLFVSGHFKGNYKAQLTRLNHITNCNGAVLSVEELLIGGEMIKAGTLTLEEVRRKFNNGEINF

SEQ ID NO: 97 - protein, 196 aa, Artificial Sequence
  Synthesized
QLVKSELEEKKSELRHKLKYVPHEYIELIEIARNSTQDRILEMKVMEFFMKVYGYRGKHLGGSRKPDGAIYTVGSPIDYGVIVDTKAYSGGYNLPIGQADEMQRYVKENQTRNKHINPNEWWKVYPSSVTEFKFLFVSGHFKGNYKAQLTRLNHKTNCNGAVLSVEELLIGGEMIKAGTLTLEEVRRKFNNGEINF

SEQ ID NO: 98 - protein, 196 aa, Artificial Sequence
  Synthesized
QLVKSELEEKKSELRHKLKYVPHEYIELIEIARNSTQDRILEMKVMEFFMKVYGYRGKHLGGSRKPDGAIYTVGSPIDYGVIVDTKAYSGGYNLPIGQADEMERYVEENQTRNKHLNPNEWWKVYPSSVTEFKFLFVSGHFKGNYKAQLTRLNHITNCNGAVLSVEELLIGGEMIKAGTLTLEEVRRKFNNGEINF

SEQ ID NO: 99 - protein, 323 aa, Artificial Sequence [sequence omitted]

SEQ ID NO: 100 - protein, 127 aa, Artificial Sequence
  Synthesized
MNVPTQLLGLLLLWLTGGKCDIQMTQSPASLSASLEEIVTITCKASQAIDAYLSWYQQKPGKSPQLLIYDATSLADGVPSRFSGSRSGTQYSLKISRPQVDDSGIYYCLQSYSTPFTFGSGTKLEIK

SEQ ID NO: 101 - protein, 184 aa, Homo sapiens
MAPLLPIRTLPLILILLALLSPGAADFNISSLSGLLSPALTESLLVALPPCHLTGGNATLMVRRANDSKVVTSSFVVPPCRGRRELVSVVDSGAGFTVTRLSAYQVTNLVPGTKFYISYLVKKGTATESSREIPMSTLPRRNMESIGLGMARTGGMVVITVLLSVAMFLLVLGFIIALALGSRK

SEQ ID NO: 102 - protein, 909 aa, Homo sapiens
MAARPLPVSPARALLLALAGALLAPCEARGVSLWNQGRADEVVSASVGSGDLWIPVKSFDSKNHPEVLNIRLQRESKELIINLERNEGLIASSFTETHYLQDGTDVSLARNYTVILGHCYYHGHVRGYSDSAVSLSTCSGLRGLIVFENESYVLEPMKSATNRYKLFPAKKLKSVRGSCGSHHNTPNLAAKNVFPPPSQTWARRHKRETLKATKYVELVIVADNREFQRQGKDLEKVKQRLIEIANHVDKFYRPLNIRIVLVGVEVWNDMDKCSVSQDPFTSLHEFLDWRKMKLLPRKSHDNAQLVSGVYFQGTTIGMAPIMSMCTADQSGGIVMDHSDNPLGAAVTLAHELGHNFGMNHDTLDRGCSCQMAVEKGGCIMNASTGYPFPMVFSSCSRKDLETSLEKGMGVCLFNLPEVRESFGGQKCGNRFVEEGEECDCGEPEECMNRCCNATTCTLKPDAVCAHGLCCEDCQLKPAGTACRDSSNSCDLPEFCTGASPHCPANVYLHDGHSCQDVDGYCYNGICQTHEQQCVTLWGPGAKPAPGICFERVNSAGDPYGNCGKVSKSSFAKCEMRDAKCGKIQCQGGASRPVIGTNAVSIETNIPLQQGGRILCRGTHVYLGDDMPDPGLVLAGTKCADGKICLNRQCQNISVFGVHECAMQCHGRGVCNNRKNCHCEAHWAPPFCDKFGFGGSTDSGPIRQADNQGLTIGILVTILCLLAAGFVVYLKRKTLIRLLFTNKKTTIEKLRCVRPSRPPRGFQPCQAHLGHLGKGLMRKPPDSYPPKDNPRRLLQCQNVDISRPLNGLNVPQPQSTQRVLPPLHRAPRAPSVPARPLPAKPALRQAQGTCKPNPPQKPLPADPLARTTRLTHALARTPGQWETGLRLAPLRPAPQYPHQVPRSTHTAYIK

SEQ ID NO: 103 - protein, 553 aa, Homo sapiens
MVQRLWVSRLLRHRKAQLLLVNLLTFGLEVCLAAGITYVPPLLLEVGVEEKFMTMVLGIGPVLGLVCVPLLGSASDHWRGRYGRRRPFIWALSLGILLSLFLIPRAGWLAGLLCPDPRPLELALLILGVGLLDFCGQVCFTPLEALLSDLFRDPDHCRQAYSVYAFMISLGGCLGYLLPAIDWDTSALAPYLGTQEECLFGLLTLIFLTCVAATLLVAEEAALGPTEPAEGLSAPSLSPHCCPCRARLAFRNLGALLPRLHQLCCRMPRTLRRLFVAELCSWMALMTFTLFYTDFVGEGLYQGVPRAEPGTEARRHYDEGVRMGSLGLFLQCAISLVFSLVMDRLVQRFGTRAVYLASVAAFPVAAGATCLSHSVAVVTASAALTGFTFSALQILPYTLASLYHREKQVFLPKYRGDTGGASSEDSLMTSFLPGPKPGAPFPNGHVGAGGSGLLPPPPALCGASACDVSVRVVVGEPTEARVVPGRGICLDLAILDSAFLLSQVAPSLFMGSIVQLSQSVTAYMVSAAGLGLVAIYFATQVVFDKSDLAKYSA

SEQ ID NO: 104 - protein, 418 aa, Homo sapiens
MRAAPLLLARAASLSLGFLFLLFFWLDRSVLAKELKFVTLVFRHGDRSPIDTFPTDPIKESSWPQGFGQLTQLGMEQHYELGEYIRKRYRKFLNESYKHEQVYIRSTDVDRTLMSAMTNLAALFPPEGVSIWNPILLWQPIPVHTVPLSEDQLLYLPFRNCPRFQELESETLKSEEFQKRLHPYKDFIATLGKLSGLHGQDLFGIWSKVYDPLYCESVHNFTLPSWATEDTMTKLRELSELSLLSLYGIHKQKEKSRLQGGVLVNEILNHMKRATQIPSYKKLIMYSAHDTTVSGLQMALDVYNGLLPPYASCHLTELYFEKGEYFVEMYYRNETQHEPYPLMLPGCSPSCPLERFAELVGPVIPQDWSTECMTTNSHQVLKVIFAVAFCLISAVLMVLLFIHIRRGLCWQRESYGNI

SEQ ID NO: 105 - protein, 560 aa, Homo sapiens
MKMQKGNVLLMFGLLLHLEAATNSNETSTSANTGSSVISSGASTATNSGSSVTSSGVSTATISGSSVTSNGVSIVTNSEFHTTSSGISTATNSEFSTVSSGISIATNSESSTTSSGASTATNSESSTPSSGASTATNSDSSTTSSGASTATNSDSSTTSSEASTATNSESSTTSSGASTATNSESSTVSSRASTATNSESSTTSSGASTATNSESRTTSNGAGTATNSESSTTSSGASTATNSESSTPSSGAGTATNSESSTTSSGAGTATNSESSTVSSGISTVTNSESSTPSSGANTATNSESSTTSSGANTATNSDSSTTSSGASTATNSESSTTSSGASTATNSESSTTSSGASTATNSGSSTTSSGTSTATNSESSTVSSGASTATTSESSTTSSGASTATNSESSTVSSGASTATNSESSTTSSGANTATNSGSSVTSAGSGTAALTGMHTTSHSASTAVSEAKPGGSLVPWEIFLITLVSVVAAVGLFAGLFFCVRNSLSLRNTFNTAVYHPHGLNHGLGPGPGGNHGAPHRPRWSPNWFWRRPVSSIAMEMS

SEQ ID NO: 106 - protein, 14507 aa, Homo sapiens
MLKPSGLPGSSSPTRSLMTGSRSTKATPEMDSGLTGATLSPKTSTGAIVVTEHTLPFTSPDKTLASPTSSVVGRTTQSLGVMSSALPESTSRGMTHSEQRTSPSLSPQVNGTPSRNYPATSMVSGLSSPRTRTSSTEGNFTKEASTYTLTVETTSGPVTEKYTVPTETSTTEGDSTETPWDTRYIPVKITSPMKTFADSTASKENAPVSMTPAETTVTDSHTPGRTNPSFGTLYSSFLDLSPKGTPNSRGETSLELILSTTGYPFSSPEPGSAGHSRISTSAPLSSSASVLDNKISETSIFSGQSLTSPLSPGVPEARASTMPNSAIPFSMTLSNAETSAERVRSTISSLGTPSISTKQTAETILTFHAFAETMDIPSTHIAKTLASEWLGSPGTLGGTSTSALTTTSPSTTLVSEETNTHHSTSGKETEGTLNTSMTPLETSAPGEESEMTATLVPTLGFTTLDSKIRSPSQVSSSHPTRELRTTGSTSGRQSSSTAAHGSSDILRATTSSTSKASSWTSESTAQQFSEPQHTQWVETSPSMKTERPPASTSVAAPITTSVPSVVSGFTTLKTSSTKGIWLEETSADTLIGESTAGPTTHQFAVPTGISMTGGSSTRGSQGTTHLLTRATASSETSADLTLATNGVPVSVSPAVSKTAAGSSPPGGTKPSYTMVSSVIPETSSLQSSAFREGTSLGLTPLNTRHPFSSPEPDSAGHTKISTSIPLLSSASVLEDKVSATSTFSHHKATSSITTGTPEISTKTKPSSAVLSSMTLSNAATSPERVRNATSPLTHPSPSGEETAGSVLTLSTSAETTDSPNIHPTGTLTSESSESPSTLSLPSVSGVKTTFSSSTPSTHLFTSGEETEETSNPSVSQPETSVSRVRTTLASTSVPTPVFPTMDTWPTRSAQFSSSHLVSELRATSSTSVTNSTGSALPKISHLTGTATMSQTNRDTFNDSAAPQSTTWPETSPRFKTGLPSATTTVSTSATSLSATVMVSKFTSPATSSMEATSIREPSTTILTTETTNGPGSMAVASTNIPIGKGYITEGRLDTSHLPIGTTASSETSMDFTMAKESVSMSVSPSQSMDAAGSSTPGRTSQFVDTFSDDVYHLTSREITIPRDGTSSALTPQMTATHPPSPDPGSARSTWLGILSSSPSSPTPKVTMSSTFSTQRVTTSMIMDTVETSRWNMPNLPSTTSLTPSNIPTSGAIGKSTLVPLDTPSPATSLEASEGGLPTLSTYPESTNTPSIHLGAHASSESPSTIKLTMASVVKPGSYTPLTFPSIETHIHVSTARMAYSSGSSPEMTAPGETNTGSTWDPTTYITTTDPKDTSSAQVSTPHSVRTLRTTENHPKTESATPAAYSGSPKISSSPNLTSPATKAWTITDTTEHSTQLHYTKLAEKSSGFETQSAPGPVSVVIPTSPTIGSSTLELTSDVPGEPLVLAPSEQTTITLPMATWLSTSLTEEMASTDLDISSPSSPMSTFAIFPPMSTPSHELSKSEADTSAIRNTDSTTLDQHLGIRSLGRTGDLTTVPITPLTTTWTSVIEHSTQAQDTLSATMSPTHVTQSLKDQTSIPASASPSHLTEVYPELGTQGRSSSEATTFWKPSTDTLSREIETGPTNIQSTPPMDNTTTGSSSSGVTLGIAHLPIGTSSPAETSTNMALERRSSTATVSMAGTMGLLVTSAPGRSISQSLGRVSSVLSESTTEGVTDSSKGSSPRLNTQGNTALSSSLEPSYAEGSQMSTSIPLTSSPTTPDVEFIGGSTFWTKEVTTVMTSDISKSSARTESSSATLMSTALGSTENTGKEKLRTASMDLPSPTPSMEVTPWISLTLSNAPNTTDSLDLSHGVHTSSAGTLATDRSLNTGVTRASRLENGSDTSSKSLSMGNSTHTSMTYTEKSEVSSSIHPRPETSAPGAETTLTSTPGNRAISLTLPFSSIPVEEVISTGITSGPDINSAPMTHSPITPPTIVWTSTGTIEQSTQPLHAVSSEKVSVQTQSTPYVNSVAVSASPTHENSVSSGSSTSSPYSSASLESLDSTISRRNAITSWLWDLTTSLPTTTWPSTSLSEALSSGHSGVSNPSSTTTEFPLFSAASTSAAKQRNPETETHGPQNTAASTLNTDASSVTGLSETPVGASISSEVPLPMAITSRSDVSGLTSESTANPSLGTASSAGTKLTRTISLPTSESLVSFRMNKDPWTVSIPLGSHPTTNTETSIPVNSAGPPGLSTVASDVIDTPSDGAESIPTVSFSPSPDTEVTTISHFPEKTTHSFRTISSLTHELTSRVTPIPGDWMSSAMSTKPTGASPSITLGERRTITSAAPTTSPIVLTASFTETSTVSLDNETTVKTSDILDARKTNELPSDSSSSSDLINTSIASSTMDVTKTASISPTSISGMTASSSPSLFSSDRPQVPTSTTETNTATSPSVSSNTYSLDGGSNVGGTPSTLPPFTITHPVETSSALLAWSRPVRTFSTMVSTDTASGENPTSSNSVVTSVPAPGTWTSVGSTTDLPAMGFLKTSPAGEAHSLLASTIEPATAFTPHLSAAVVTGSSATSEASLLTTSESKAIHSSPQTPTTPTSGANWETSATPESLLVVTETSDTTLTSKILVTDTILFSTVSTPPSKFPSTGTLSGASFPTLLPDTPAIPLTATEPTSSLATSFDSTPLVTIASDSLGTVPETTLTMSETSNGDALVLKTVSNPDRSIPGITIQGVTESPLHPSSTSPSKIVAPRNTTYEGSITVALSTLPAGTTGSLVFSQSSENSETTALVDSSAGLERASVMPLTTGSQGMASSGGIRSGSTHSTGTKTFSSLPLTMNPGEVTAMSEITTNRLTATQSTAPKGIPVKPTSAESGLLTPVSASSSPSKAFASLTTAPPTWGIPQSTLTFEFSEVPSLDTKSASLPTPGQSLNTIPDSDASTASSSLSKSPEKNPRARMMTSTKAISASSFQSTGFTETPEGSASPSMAGHEPRVPTSGTGDPRYASESMSYPDPSKASSAMTSTSLASKLTTLFSTGQAARSGSSSSPISLSTEKETSFLSPTASTSRKTSLFLGPSMARQPNILVHLQTSALTLSPTSTLNMSQEEPPELTSSQTIAEEEGTTAETQTLTFTPSETPTSLLPVSSPTEPTARRKSSPETWASSISVPAKTSLVETTDGTLVTTIKMSSQAAQGNSTWPAPAEETGSSPAGTSPGSPEMSTTLKIMSSKEPSISPEIRSTVRNSPWKTPETTVPMETTVEPVTLQSTALGSGSTSISHLPTGTTSPTKSPTENMLATERVSLSPSPPEAWTNLYSGTPGGTRQSLATMSSVSLESPTARSITGTGQQSSPELVSKTTGMEFSMWHGSTGGTTGDTHVSLSTSSNILEDPVTSPNSVSSLTDKSKHKTETWVSTTAIPSTVLNNKIMAAEQQTSRSVDEAYSSTSSWSDQTSGSDITLGASPDVTNTLYITSTAQTTSLVSLPSGDQGITSLTNPSGGKTSSASSVTSPSIGLETLRANVSAVKSDIAPTAGHLSQTSSPAEVSILDVTTAPTPGISTTITTMGTNSISTTTPNPEVGMSTMDSTPATERRTTSTEHPSTWSSTAASDSWTVTDMTSNLKVARSPGTISTMHTTSFLASSTELDSMSTPHGRITVIGTSLVTPSSDASAVKTETSTSERTLSPSDTTASTPISTFSRVQRMSISVPDILSTSWTPSSTEAEDVPVSMVSTDHASTKTDPNTPLSTFLFDSLSTLDWDTGRSLSSATATTSAPQGATTPQELTLETMISPATSQLPFSIGHITSAVTPAAMARSSGVTFSRPDPTSKKAEQTSTQLPTTTSAHPGQVPRSAATTLDVIPHTAKTPDATFQRQGQTALTTEARATSDSWNEKEKSTPSAPWITEMMNSVSEDTIKEVTSSSSVLRTLNTLDINLESGTTSSPSWKSSPYERIAPSESTTDKEAIHPSTNTVETTGWVTSSEHASHSTIPAHSASSKLTSPVVTTSTREQAIVSMSTTTWPESTRARTEPNSFLTIELRDVSPYMDTSSTTQTSIISSPGSTAITKGPRTEITSSKRISSSFLAQSMRSSDSPSEAITRLSNFPAMTESGGMILAMQTSPPGATSLSAPTLDTSATASWTGTPLATTQRFTYSEKTTLFSKGPEDTSQPSPPSVEETSSSSSLVPIHATTSPSNILLTSQGHSPSSTPPVTSVFLSETSGLGKTTDMSRISLEPGTSLPPNLSSTAGEALSTYEASRDTKAIHHSADTAVTNMEATSSEYSPIPGHTKPSKATSPLVTSHIMGDITSSTSVFGSSETTEIETVSSVNQGLQERSTSQVASSATETSTVITHVSSGDATTHVTKTQATFSSGTSISSPHQFITSTNTFTDVSTNPSTSLIMTESSGVTITTQTGPTGAATQGPYLLDTSTMPYLTETPLAVTPDFMQSEKTTLISKGPKDVSWTSPPSVAETSYPSSLTPFLVTTIPPATSTLQGQHTSSPVSATSVLTSGLVKTTDMLNTSMEPVTNSPQNLNNPSNEILATLAATTDIETIHPSINKAVTNMGTASSAHVLHSTLPVSSEPSTATSPMVPASSMGDALASISIPGSETTDIEGEPTSSLTAGRKENSTLQEMNSTTESNIILSNVSVGAITEATKMEVPSFDATFIPTPAQSTKFPDIFSVASSRLSNSPPMTISTHMTTTQTGSSGATSKIPLALDTSTLETSAGTPSVVTEGFAHSKITTAMNNDVKDVSQTNPPFQDEASSPSSQAPVLVTTLPSSVAFTPQWHSTSSPVSMSSVLTSSLVKTAGKVDTSLETVTSSPQSMSNTLDDISVTSAATTDIETTHPSINTVVTNVGTTGSAFESHSTVSAYPEPSKVTSPNVTTSTMEDTTISRSIPKSSKTTRTETETTSSLTPKLRETSISQEITSSTETSTVPYKELTGATTEVSRTDVTSSSSTSFPGPDQSTVSLDISTETNTRLSTSPIMTESAEITITTQTGPHGATSQDTFTMDPSNTTPQAGIHSAMTHGFSQLDVTTLMSRIPQDVSWTSPPSVDKTSSPSSFLSSPAMTTPSLISSTLPEDKLSSPMTSLLTSGLVKITDILRTRLEPVTSSLPNFSSTSDKILATSKDSKDTKEIFPSINTEETNVKANNSGHESHSPALADSETPKATTQMVITTTVGDPAPSTSMPVHGSSETTNIKREPTYFLTPRLRETSTSQESSFPTDTSFLLSKVPTGTITEVSSTGVNSSSKISTPDHDKSTVPPDTFTGEIPRVFTSSIKTKSAEMTITTQASPPESASHSTLPLDTSTTLSQGGTHSTVTQGFPYSEVTTLMGMGPGNVSWMTTPPVEETSSVSSLMSSPAMTSPSPVSSTSPQSIPSSPLPVTALPTSVLVTTTDVLGTTSPESVTSSPPNLSSITHERPATYKDTAHTEAAMHHSTNTAVTNVGTSGSGHKSQSSVLADSETSKATPLMSTTSTLGDTSVSTSTPNISQTNQIQTEPTASLSPRLRESSTSEKTSSTTETNTAFSYVPTGAITQASRTEISSSRTSISDLDRPTIAPDISTGMITRLFTSPIMTKSAEMTVTTQTTTPGATSQGILPWDTSTTLFQGGTHSTVSQGFPHSEITTLRSRTPGDVSWMTTPPVEETSSGFSLMSPSMTSPSPVSSTSPESIPSSPLPVTALLTSVLVTTTNVLGTTSPEPVTSSPPNLSSPTQERLTTYKDTAHTEAMHASMHTNTAVANVGTSISGHESQSSVPADSHTSKATSPMGITFAMGDTSVSTSTPAFFETRIQTESTSSLIPGLRDTRTSEEINTVTETSTVLSEVPTTTTTEVSRTEVITSSRTTISGPDHSKMSPYISTETITRLSTFPFVTGSTEMAITNQTGPIGTISQATLTLDTSSTASWEGTHSPVTQRFPHSEETTTMSRSTKGVSWQSPPSVEETSSPSSPVPLPAITSHSSLYSAVSGSSPTSALPVTSLLTSGRRKTIDMLDTHSELVTSSLPSASSFSGEILTSEASTNTETIHFSENTAETNMGTTNSMHKLHSSVSIHSQPSGHTPPKVTGSMMEDAIVSTSTPGSPETKNVDRDSTSPLTPELKEDSTALVMNSTTESNTVFSSVSLDAATEVSRAEVTYYDPTFMPASAQSTKSPDISPEASSSHSNSPPLTISTHKTIATQTGPSGVTSLGQLTLDTSTIATSAGTPSARTQDFVDSETTSVMNNDLNDVLKTSPFSAEEANSLSSQAPLLVTTSPSPVTSTLQEHSTSSLVSVTSVPTPTLAKITDMDTNLEPVTRSPQNLRNTLATSEATTDTHTMHPSINTAVANVGTTSSPNEFYFTVSPDSDPYKATSAVVITSTSGDSIVSTSMPRSSAMKKIESETTFSLIFRLRETSTSQKIGSSSDTSTVFDKAFTAATTEVSRTELTSSSRTSIQGTEKPTMSPDTSTRSVTMLSTFAGLTKSEERTIATQTGPHRATSQGTLTWDTSITTSQAGTHSAMTHGFSQLDLSTLTSRVPEYISGTSPPSVEKTSSSSSLLSLPAITSPSPVPTTLPESRPSSPVHLTSLPTSGLVKTTDMLASVASLPPNLGSTSHKIPTTSEDIKDTEKMYPSTNIAVTNVGTTTSEKESYSSVPAYSEPPKVTSPMVTSFNIRDTIVSTSMPGSSEITRIEMESTFSLAHGLKGTSTSQDPIVSTEKSAVLHKLTTGATETSRTEVASSRRTSIPGPDHSTESPDISTEVIPSLPISLGITESSNMTIITRTGPPLGSTSQGTFTLDTPTTSSRAGTHSMATQEFPHSEMTTVMNKDPEILSWTIPPSIEKTSFSSSLMPSPAMTSPPVSSTLPKTIHTTPSPMTSLLTPSLVMTTDTLGTSPEPTTSSPPNLSSTSHEILTTDEDTTAIEAMHPSTSTAATNVETTSSGHGSQSSVLADSEKTKATAPMDTTSTMGHTTVSTSMSVSSETTKIKRESTYSLTPGLRETSISQNASFSTDTSIVLSEVPTGTTAEVSRTEVTSSGRTSIPGPSQSTVLPEISTRTMTRLFASPTMTESAEMTIPTQTGPSGSTSQDTLTLDTSTTKSQAKTHSTLTQRFPHSEMTTLMSRGPGDMSWQSSPSLENPSSLPSLLSLPATTSPPPISSTLPVTISSSPLPVTSLLTSSPVTTTDMLHTSPELVTSSPPKLSHTSDERLTTGKDTTNTEAVHPSTNTAASNVEIPSSGHESPSSALADSETSKATSPMFITSTQEDTTVAISTPHFLETSRIQKESISSLSPKLRETGSSVETSSAIETSAVLSEVSIGATTEISRTEVTSSSRTSISGSAESTMLPEISTTRKIIKFPTSPILAESSEMTIKTQTSPPGSTSESTFTLDTSTTPSLVITHSTMTQRLPHSEITTLVSRGAGDVPRPSSLPVEETSPPSSQLSLSAMISPSPVSSTLPASSHSSSASVTSLLTPGQVKTTEVLDASAEPETSSPPSLSSTSVEILATSEVTTDTEKIHPFSNTAVTKVGTSSSGHESPSSVLPDSETTKATSAMGTISIMGDTSVSTLTPALSNTRKIQSEPASSLTTRLRETSTSEETSLATEANTVLSKVSTGATTEVSRTEAISFSRTSMSGPEQSTMSQDISIGTIPRISASSVLTESAKMTITTQTGPSESTLESTLNLNTATTPSWVETHSIVIQGFPHPEMTTSMGRGPGGVSWPSPPFVKETSPPSSPLSLPAVTSPHPVSTTFLAHIPPSPLPVTSLLTSGPATTTDILGTSTEPGTSSSSSLSTTSHERLTTYKDTAHTEAVHPSTNTGGTNVATTSSGYKSQSSVLADSSPMCTTSTMGDTSVLTSTPAFLETRRIQTELASSLTPGLRESSGSEGTSSGTKMSTVLSKVPTGATTEISKEDVTSIPGPAQSTISPDISTRTVSWFSTSPVMTESAEITMNTHTSPLGATTQGTSTLDTSSTTSLTMTHSTISQGFSHSQMSTLMRRGPEDVSWMSPPLLEKTRPSFSLMSSPATTSPSPVSSTLPESISSSPLPVTSLLTSGLAKTTDMLHKSSEPVTNSPANLSSTSVEILATSEVTTDTEKTHPSSNRTVTDVGTSSSGHESTSFVLADSQTSKVTSPMVITSTMEDTSVSTSTPGFFETSRIQTEPTSSLTLGLRKTSSSEGTSLATEMSTVLSGVPTGATAEVSRTEVTSSSRTSISGFAQLTVSPETSTETITRLPTSSIMTESAEMMIKTQTDPPGSTPESTHTVDISTTPNWVETHSTVTQRFSHSEMTTLVSRSPGDMLWPSQSSVEETSSASSLLSLPATTSPSPVSSTLVEDFPSASLPVTSLLNPGLVITTDRMGISREPGTSSTSNLSSTSHERLTTLEDTVDTEDMQPSTHTAVTNVRTSISGHESQSSVLSDSETPKATSPMGTTYTMGETSVSISTSDFFETSRIQIEPTSSLTSGLRETSSSERISSATEGSTVLSEVPSGATTEVSRTEVISSRGTSMSGPDQFTISPDISTEAITRLSTSPIMTESAESAITIETGSPGATSEGTLTLDTSTTTFWSGTHSTASPGFSHSEMTTLMSRTPGDVPWPSLPSVEEASSVSSSLSSPAMTSTSFFSTLPESISSSPHPVTALLTLGPVKTTDMLRTSSEPETSSPPNLSSTSAEILATSEVTKDREKIHPSSNTPVVNVGTVIYKHLSPSSVLADLVTTKPTSPMATTSTLGNTSVSTSTPAFPETMMTQPTSSLTSGLREISTSQETSSATERSASLSGMPTGATTKVSRTEALSLGRTSTPGPAQSTISPEISTETITRISTPLTTTGSAEMTITPKTGHSGASSQGTFTLDTSSRASWPGTHSAATHRSPHSGMTTPMSRGPEDVSWPSRPSVEKTSPPSSLVSLSAVTSPSPLYSTPSESSHSSPLRVTSLFTPVMMKTTDMLDTSLEPVTTSPPSMNITSDESLATSKATMETEAIQLSENTAVTQMGTISARQEFYSSYPGLPEPSKVTSPVVTSSTIKDIVSTTIPASSEITRIEMESTSTLTPTPRETSTSQEIHSATKPSTVPYKALTSATIEDSMTQVMSSSRGPSPDQSTMSQDISTEVITRLSTSPIKTESTEMTITTQTGSPGATSRGTLTLDTSTTFMSGTHSTASQGFSHSQMTALMSRTPGDVPWLSHPSVEEASSASFSLSSPVMTSSSPVSSTLPDSIHSSSLPVTSLLTSGLVKTTELLGTSSEPETSSPPNLSSTSAEILAITEVTTDTEKLEMTNVVTSGYTHESPSSVLADSVTTKATSSMGITYPTGDTNVLTSTPAFSDTSRIQTKSKLSLTPGLMETSISEETSSATEKSTVLSSVPTGATTEVSRTEAISSSRTSIPGPAQSTMSSDTSMETITRISTPLTRKESTDMAITPKTGPSGATSQGTFTLDSSSTASWPGTHSATTQRFPQSVVTTPMSRGPEDVSWPSPLSVEKNSPPSSLVSSSSVTSPSPLYSTPSGSSHSSPVPVTSLFTSIMMKATDMLDASLEPETTSAPNMNITSDESLAASKATTETEAIHVFENTAASHVETTSATEELYSSSPGFSEPTKVISPVVTSSSIRDNMVSTTMPGSSGITRIEIESMSSLTPGLRETRTSQDITSSTETSTVLYKMPSGATPEVSRTEVMPSSRTSIPGPAQSTMSLDISDEVVTRLSTSPIMTESAEITITTQTGYSLATSQVTLPLGTSMTFLSGTHSTMSQGLSHSEMTNLMSRGPESLSWTSPRFVETTRSSSSLTSLPLTTSLSPVSSTLLDSSPSSPLPVTSLILPGLVKTTEVLDTSSEPKTSSSPNLSSTSVEIPATSEIMTDTEKIHPSSNTAVAKVRTSSSVHESHSSVLADSETTITIPSMGITSAVDDTTVFTSNPAFSETRRIPTEPTFSLTPGFRETSTSEETTSITETSAVLYGVPTSATTEVSMTEIMSSNRIHIPDSDQSTMSPDIITEVITRLSSSSMMSESTQMTITTQKSSPGATAQSTLTLATTTAPLARTHSTVPPRFLHSEMTTLMSRSPENPSWKSSLFVEKTSSSSSLLSLPVTTSPSVSSTLPQSIPSSSFSVTSLLTPGMVKTTDTSTEPGTSLSPNLSGTSVEILAASEVTTDTEKIHPSSSMAVTNVGTTSSGHELYSSVSIHSEPSKATYPVGTPSSMAETSISTSMPANFETTGFEAEPFSHLTSGFRKTNMSLDTSSVTPTNTPSSPGSTHLLQSSKTDFTSSAKTSSPDWPPASQYTEIPVDIITPFNASPSITESTGITSFPESRFTMSVTESTHHLSTDLLPSAETISTGTVMPSLSEAMTSFATTGVPRAISGSGSPFSRTESGPGDATLSTIAESLPSSTPVPFSSSTFTTTDSSTIPALHEITSSSATPYRVDTSLGTESSTTEGRLVMVSTLDTSSQPGRTSSSPILDTRMTESVELGTVTSAYQVPSLSTRLTRTDGIMEHITKIPNEAAHRGTIRPVKGPQTSTSPASPKGLHTGGTKRMETTTTALKTTTTALKTTSRATLTTSVYTPTLGTLTPLNASMQMASTIPTEMMITTPYVFPDVPETTSSLATSLGAETSTALPRTTPSVFNRESETTASLVSRSGAERSPVIQTLDVSSSEPDTTASWVIHPAETIPTVSKTTPNFFHSELDTVSSTATSHGADVSSAIPTNISPSELDALTPLVTISGTDTSTTFPTLTKSPHETETRTTWLTHPAETSSTIPRTIPNFSHHESDATPSIATSPGAETSSAIPIMTVSPGAEDLVTSQVTSSGTDRNMTIPTLTLSPGEPKTIASLVTHPEAQTSSAIPTSTISPAVSRLVTSMVTSLAAKTSTTNRALTNSPGEPATTVSLVTHPAQTSPTVPWTTSIFFHSKSDTTPSMTTSHGAESSSAVPTPTVSTEVPGVVTPLVTSSRAVISTTIPILTLSPGEPETTPSMATSHGEEASSAIPTPTVSPGVPGVVTSLVTSSRAVTSTTIPILTFSLGEPETTPSMATSHGTEAGSAVPTVLPEVPGMVTSLVASSRAVTSTTLPTLTLSPGEPETTPSMATSHGAEASSTVPTVSPEVPGVVTSLVTSSSGVNSTSIPTLILSPGELETTPSMATSHGAEASSAVPTPTVSPGVSGVVTPLVTSSRAVTSTTIPILTLSSSEPETTPSMATSHGVEASSAVLTVSPEVPGMVTSLVTSSRAVTSTTIPTLTISSDEPETTTSLVTHSEAKMISAIPTLAVSPTVQGLVTSLVTSSGSETSAFSNLTVASSQPETIDSWVAHPGTEASSVVPTLTVSTGEPFTNISLVTHPAESSSTLPRTTSRFSHSELDTMPSTVTSPEAESSSAISTTISPGIPGVLTSLVTSSGRDISATFPTVPESPHESEATASWVTHPAVTSTTVPRTTPNYSHSEPDTTPSIATSPGAEATSDFPTITVSPDVPDMVTSQVTSSGTDTSITIPTLTLSSGEPETTTSFITYSETHTSSAIPTLPVSPGASKMLTSLVISSGTDSTTTFPTLTETPYEPETTAIQLIHPAETNTMVPRTTPKFSHSKSDTTLPVAITSPGPEASSAVSTTTISPDMSDLVTSLVPSSGTDTSTTFPTLSETPYEPETTATWLTHPAETSTTVSGTIPNFSHRGSDTAPSMVTSPGVDTRSGVPTTTIPPSIPGVVTSQVTSSATDTSTAIPTLTPSPGEPETTASSATHPGTQTGFTVPIRTVPSSEPDTMASWVTHPPQTSTPVSRTTSSFSHSSPDATPVMATSPRTEASSAVLTTISPGAPEMVTSQITSSGAATSTTVPTLTHSPGMPETTALLSTHPRTETSKTFPASTVFPQVSETTASLTIRPGAETSTALPTQTTSSLFTLLVTGTSRVDLSPTASPGVSAKTAPLSTHPGTETSTMIPTSTLSLGLLETTGLLATSSSAETSTSTLTLTVSPAVSGLSSASITTDKPQTVTSWNTETSPSVTSVGPPEFSRTVTGTTMTLIPSEMPTPPKTSHGEGVSPTTILRTTMVEATNLATTGSSPTVAKTTTTFNTLAGSLFTPLTTPGMSTLASESVTSRTSYNHRSWISTTSSYNRRYWTPATSTPVTSTFSPGISTSSIPSSTAATVPFMVPFTLNFTITNLQYEEDMRHPGSRKFNATERELQGLLKPLFRNSSLEYLYSGCRLASLRPEKDSSATAVDAICTHRPDPEDLGLDRERLYWELSNLTNGIQELGPYTLDRNSLYVNGFTHRSSMPTTSTPGTSTVDVGTSGTPSSSPSPTTAGPLLMPFTLNFTITNLQYEEDMRRTGSRKFNTMESVLQGLLKPLFKNTSVGPLYSGCRLTLLRPEKDGAATGVDAICTHRLDPKSPGLNREQLYWELSKLTNDIEELGPYTLDRNSLYVNGFTHQSSVSTTSTPGTSTVDLRTSGTPSSLSSPTIMAAGPLLVPFTLNFTITNLQYGEDMGHPGSRKFNTTERVLQGLLGPIFKNTSVGPLYSGCRLTSLRSEKDGAATGVDAICIHHLDPKSPGLNRERLYWELSQLTNGIKELGPYTLDRNSLYVNGFTHRTSVPTSSTPGTSTVDLGTSGTPFSLPSPATAGPLLVLFTLNFTITNLKYEEDMHRPGSRKFNTTERVLQTLLGPMFKNTSVGLLYSGCRLTLLRSEKDGAATGVDAICTHRLDPKSPGVDREQLYWELSQLTNGIKELGPYTLDRNSLYVNGFTHWIPVPTSSTPGTSTVDLGSGTPSSLPSPTTAGPLLVPFTLNFTITNLKYEEDMHCPGSRKFNTTERVLQSLLGPMFKNTSVGPLYSGCRLTLLRSEKDGAATGVDAICTHRLDPKSPGVDREQLYWELSQLTNGIKELGPYTLDRNSLYVNGFTHQTSAPNTSTPGTSTVDLGTSGTPSSLPSPTSAGPLLVPFTLNFTITNLQYEEDMHHPGSRKFNTTERVLQGLLGPMFKNTSVGLLYSGCRLTLLRPEKNGAATGMDAICSHRLDPKSPGLNREQLYWELSQLTHGIKELGPYTLDRNSLYVNGFTHRSSVAPTSTPGTSTVDLGTSGTPSSLPSPTTAVPLLVPFTLNFTITNLQYGEDMRHPGSRKFNTTERVLQGLLGPLFKNSSVGPLYSGCRLISLRSEKDGAATGVDAICTHHLNPQSPGLDREQLYWQLSQMTNGIKELGPYTLDRNSLYVNGFTHRSSGLTTSTPWTSTVDLGTSGTPSPVPSPTTTGPLLVPFTLNFTITNLQYEENMGHPGSRKFNITESVLQGLLKPLFKSTSVGPLYSGCRLTLLRPEKDGVATRVDAICTHRPDPKIPGLDRQQLYWELSQLTHSITELGPYTLDRDSLYVNGFTQRSSVPTTSTPGTFTVQPETSETPSSLPGPTATGPVLLPFTLNFTITNLQYEEDMRRPGSRKFNTTERVLQGLLMPLFKNTSVSSLYSGCRLTLLRPEKDGAATRVDAVCTHRPDPKSPGLDRERLYWKLSQLTHGITELGPYTLDRHSLYVNGFTHQSSMTTTRTPDTSTMHLATSRTPASLSGPMTASPLLVLFTINFTITNLRYEENMHHPGSRKFNTTERVLQGLLRPVFKNTSVGPLYSGCRLTLLRPKKDGAATKVDAICTYRPDPKSPGLDREQLYWELSQLTHSITELGPYTLDRDSLYVNGFTQRSSVPTTSIPGTPTVDLGTSGTPVSKPGPSAASPLLVLFTLNFTITNLRYEENMQHPGSRKFNTTERVLQGLLRSLFKSTSVGPLYSGCRLTLLRPEKDGTATGVDAICTHHPDPKSPRLDREQLYWELSQLTHNITELGPYALDNDSLFVNGFTHRSSVSTTSTPGTPTVYLGASKTPASIFGPSAASHLLILFTLNFTITNLRYEENMWPGSRKFNTTERVLQGLLRPLFKNTSVGPLYSGCRLTLLRPEKDGEATGVDAICTHRPDPTGPGLDREQLYLELSQLTHSITELGPYTLDRDSLYVNGFTHRSSVPTTSTGVVSEEPFTLNFTINNLRYMADMGQPGSLKFNITDNVMQHLLSPLFQRSSLGARYTGCRVIALRSVKNGAETRVDLLCTYLQPLSGPGLPIKQVFHELSQQTHGITRLGPYSLDKDSLYLNGYNEPGPDEPPTTPKPATTFLPPLSEATTAMGYHLKTLTLNFTISNLQYSPDMGKGSATFNSTEGVLQHLLRPLFQKSSMGPFYLGCQLISLRPEKDGAATGVDTTCTYHPDPVGPGLDIQQLYWELSQLTHGVTQLGFYVLDRDSLFINGYAPQNLSIRGEYQINFHIVNWNLSNPDPTSSEYITLLRDIQDKVTTLYKGSQLHDTFRFCLVTNLTMDSVLVTVKALFSSNLDPSLVEQVFLDKTLNASFHWLGSTYQLVDIHVTEMESSVYQPTSSSSTQHFYLNFTITNLPYSQDKAQPGTTNYQRNKRNIEDALNQLFRNSSIKSYFSDCQVSTFRSVPNRHHTGVDSLCNFSPLARRVDRVAIYEEFLRMTRNGTQLQNFTLDRSSVLVDGYSPNRNEPLTGNSDLPFWAVILIGLAGLLGVITCLICGVLVTTRRRKKEGEYNVQQQCPGYYQSHLDLEDLQ

SEQ ID NO: 107 - protein, 267 aa, Homo sapiens
MMSSKPTSHAEVNETIPNPYPPSSFMAPGFQQPLGSINLENQAQGAQRAQPYGITSPGIFASSQPGQGNIQMINPSVGTAVMNFKEEAKALGVIQIMVGLMHIGFGIVLCLISFSFREVLGFASTAVIGGYPFWGGLSFIISGSLSVSASKELSRCLVKGSLGMNIVSSILAFIGVILLLVDMCINGVAGQDYWAVLSGKGISATLMIFSLLEFFVACATAHFANQANTTTNMSVLVIPNMYESNPVTPASSSAPPRCNNYSANAPK

SEQ ID NO: 108 - protein, 535 aa, Homo sapiens
MLGPCMLLLLLLLGLRLQLSLGIIPVEEENPDFWNREAAEALGAAKKLQPAQTAAKNLIIFLGDGMGVSTVTAARILKGQKKDKLGPEIPLAMDRFPYVALSKTYNVDKHVPDSGATATAYLCGVKGNFQTIGLSAAARFNQCNTTRGNEVISVMNRAKKAGKSVGVVTTTRVQHASPAGTYAHTVNRNWYSDADVPASARQEGCQDIATQLISNMDIDVILGGGRKYMFRMGTPDPEYPDDYSQGGTRLDGKNLVQEWLAKRQGARYVWNRTELMQASLDPSVTHLMGLFEPGDMKYEIHRDSTLDPSLMEMTEAALRLLSRNPRGFFLFVEGGRIDHGHHESRAYRALTETIMFDDAIERAGQLTSEEDTLSLVTADHSHVFSFGGYPLRGSSIFGLAPGKARDRKAYTVLLYGNGPGYVLKDGARPDVTESESGSPEYRQQSAVPLDEETHAGEDVAVFARGPQAHLVHGVQEQTFIAHVMAFAACLEPYTACDLAPPAGTTDAAHPGRSVVPALLPLLAGTLLLLETATAP

SEQ ID NO: 109 - protein, 520 aa, Homo sapiens
MEFHNGGHVSGIGGFLVSLTSRMKPHTLAVTPALIFAITVATIGSFQFGYNTGVINAPETIIKEFINKTLTDKANAPPSEVLLTNLWSLSVAIFSVGGMIGSFSVGLFVNRFGRRNSMLIVNLLAATGGCLMGLCKIAESVEMLILGRLVIGLFCGLCTGFVPMYIGEISPTALRGAFGTLNQLGIVIGILVAQIFGLELILGSEELWPVLLGFTILPAILQSAALPCCPESPRFLLINRKKEENATRILQRLWGTQDVSQDIQEMKDESARMSQEKQVTVLELFRVSSYRQPIIISIVLQLSQQLSGINAVFYYSTGIFKDAGVQQPIYATISAGVVNTIFTLLSLFLVERAGRRTLHMIGLGGMAFCSTLMTVSLLLKNHYNGMSFVCIGAILVFVACFEIGPGPIPWFIVAELFSQGPRPAAMAVAGCSNWTSNFLVGLLFPSAAYYLGAYVFIIFTGFLITFLAFTFFKVPETRGRTFEDITRAFEGQAHGADRSGKDGVMGMNSIEPAKETTTNV

SEQ ID NO: 110 - protein, 221 aa, Homo sapiens
MLTLEDKDMKGFSWAIVPALTSLGYLIILVVSIFPFWVRLTNEESHEVFFSGLFENCFNAKCWKPRPLSIYIILGRVFLLSAVFLAFVTTFIMMPFASEFFPRTWKQNFVLACISFFTGACAFLALVLHALEIKALRMKLGPLQFSVLWPYYVLGFGIFLFIVAGTICLIQEMVCPCWHLLSTSQSMEEDHGSLYLDNLESLGGEPSSVQKETQVTAETVI

SEQ ID NO: 111 - protein, 538 aa, Homo sapiens
MGLLLLVLILTPSLAAYRHPDFPLLEKAQQLLQSTGSPYSTNCWLCTSSSTETPGTAYPASPREWTSIEAELHISYRWDPNLKGLMRPANSLLSTVKQDFPDIRQKPPIFGPIFTNINLMGIAPICVMAKRKNGTNVGTLPSTVCNVTFTVDSNQQTYQTYTHNQFRHQPRFPKPPNITFPQGTLLDKSSRFCQGRPSSCSTRNFWFRPADYNQCLQISNLSSTAEWVLLDQTRNSLFWENKTKGANQSQTPCVQVLAGMTIATSYLGISAVSEFFGTSLTPLFHFHISTCLKTQGAFYICGQSIHQCLPSNWTGTCTIGYVTPDIFIAPGNLSLPIPIYGNSPLPRVRRAIHFIPLLAGLGILAGTGTGIAGITKASLTYSQLSKEIANNIDTMAKALTTMQEQIDSLAAVVLQNRRGLDMLTAAQGGICLALDEKCCFWVNQSGKVQDNIRQLLNQASSLRERATQGWLNWEGTWKWFSWVLPLTGPLVSLLLLLLFGPCLLNLITQFVSSRLQAIKLQTNLSAGRHPRNIQESPF

SEQ ID NO: 112 - protein, 1017 aa, Homo sapiens
MVFSVRQCGHVGRTEEVLLTFKIFLVIICLHVVLVTSLEEDTDNSSLSPPPAKLSVVSFAPSSNGTPEVETTSLNDVTLSLLPSNETEKTKITIVKTFNASGVKPQRNICNLSSICNDSAFFRGEIMFQYDKESTVPQNQHITNGTLTGVLSLSELKRSELNKTLQTLSETYFIMCATAEAQSTLNCTFTIKLNNTMNACAVIAALERVKIRPMEHCCCSVRIPCPSSPEELEKLQCDLQDPIVCLADHPRGPPFSSSQSIPVVPRATVLSQVPKATSFAEPPDYSPVTHNVPSPIGEIQPLSPQPSAPIASSPAIDMPPQSETISSPMPQTHVSGTPPPVKASFSSPTVSAPANVNTTSAPPVQTDIVNTSSISDLENQVLQMEKALSLGSLEPNLAGEMINQVSRLLHSPPDMLAPLAQRLLKVVDDIGLQLNFSNTTISLTSPSLALAVIRVNASSFNTTTFVAQDPANLQVSLETQAPENSIGTITLPSSLMNNLPAHDMELASRVQFNFFETPALFQDPSLENLSLISYVISSSVANLTVRNLTRNVTVTLKHINPSQDELTVRCVFWDLGRNGGRGGWSDNGCSVKDRRLNETICTCSHLTSFGVLLDLSRTSVLPAQMMALTFITYIGCGLSSIFLSVTLVTYIAFEKIRRDYPSKILIQLCAALLLLNLVFLLDSWIALYKMQGLCISVAVFLHYFLLVSFTWMGLEAFHMYLALVKVFNTYIRKYILKFCIVGWGVPAVVVTIILTISPDNYGLGSYGKFPNGSPDDFCWINNNAVFYITVVGYFCVIFLLNVSMFIVVLVQLCRIKKKKQLGAQRKTSIQDLRSIAGLTFLLGITWGFAFFAWGPVNVTFMYLFAIFNTLQGFFIFIFYCVAKENVRKQWRRYLCCGKLRLAENSDWSKTATNGLKKQTVNQGVSSSSNSLQSSSNSTNSTTLLVNNDCSVHASGNGNASTERNGVSFSVQNGDVCLHDFTGKQHMFNEKEDSCNGKGRMALRRTSKRGSLHFIEQM

SEQ ID NO: 113 - protein, 775 aa, Homo sapiens
MEPPYSLTAHYDEFQEVKYVSRCGAGGARGASLPPGFPLGAARSATGARSGLPRWNRREVCLLSGLVFAAGLCAILAAMLALKYLGPVAAGGGACPEGCPERKAFARAARFLAANLDASIDPCQDFYSFACGGWLRRHAIPDDKLTYGTIAAIGEQNEERLRRLLARPGGGPGGAAQRKVRAFFRSCLDMREIERLGPRPMLEVIEDCGGWDLGGAEERPGVAARWDLNRLLYKAQGVYSAAALFSLTVSLDDRNSSRYVIRIDQDGLTLPERTLYLAQDEDSEKILAAYRVFMERVLSLLGADAVEQKAQEILQVEQQLANITVSEHDDLRRDVSSMYNKVTLGQLQKITPHLRWKWLLDQIFQEDFSEEEEVVLLATDYMQQVSQLIRSTPHRVLHNYLVWRVVVVLSEHLSPPFREALHELAQEMEGSDKPQELARVCLGQANRHFGMALGALFVHEHFSAASKAKVQQLVEDIKYILGQRLEELDWMDAETRAAARAKLQYMMVMVGYPDFLLKPDAVDKEYEFEVHEKTYFKNILNSIRFSIQLSVKKIRQEVDKSTWLLPPQALNAYYLPNKNQMVFPAGILQPTLYDPDFPQSLNYGGIGTIIGHELTHGYDDWGGQYDRSGNLLHWWTEASYSRFLRKAECIVRLYDNFTVYNQRVNGKHTLGENIADMGGLKLAYHAYQKWVREHGPEHPLPRLKYTHDQLFFIAFAQNWCIKRRSQSIYLQVLTDKHAPEHYRVLGSVSQFEEFGRAFHCPKDSPMNPAHKCSVW

SEQ ID NO: 114 - protein, 529 aa, Homo sapiens
MGPSCPVFLSFTKLSLWWLLLTPAGGEEAKRPPPRAPGDPLSSPSPTALPQGGSHTETEDRLFKHLFRGYNRWARPVPNTSDVVIVRFGLSIAQLIDVDEKNQMMTTNVWLKQEWSDYKLRWNPTDFGNITSLRVPSEMIWIPDIVLYNNADGEFAVTHMTKAHLFSTGTVHWVPPAIYKSSCSIDVTFFPFDQQNCKMKFGSWTYDKAKIDLEQMEQTVDLKDYWESGEWAIVNATGTYNSKKYDCCAEIYPDVTYAFVIRRLPLFYTINLIIPCLLISCLTVLVFYLPSDCGEKITLCISVLLSLTVFLLLITEIIPSTSLVIPLIGEYLLFTMIFVTLSIVITVFVLNVHHRSPSTHTMPHWVRGALLGCVPRWLLMNRPPPPVELCHPLRLKLSPSYHWLESNVDAEEREVVVEEEDRWACAGHVAPSVGTLCSHGHLHSGASGPKAEALLQEGELLLSPHMQKALEGVHYIADHLRSEDADSSVKEDWKYVAMVIDRIFLWLFIIVCFLGTIGLFLPPFLAGMI

SEQ ID NO: 115 - protein, 537 aa, Homo sapiens
MPHLMERMVGSGLLWLALVSCILTQASAVQRGYGNPIEASSYGLDLDCGAPGTPEAHVCFDPCQNYTLLDEPFRSTENSAGSQGCDKNMSGWYRFVGEGGVRMSETCVQVHRCQTDAPMWLNGTHPALGDGITNHTACAHWSGNCCFWKTEVLVKACPGGYHVYRLEGTPWCNLRYCTVPRDPSTVEDKCEKACRPEEECLALNSTWGCFCRQDLNSSDVHSLQPQLDCGPREIKVKVDKCLLGGLGLGEEVIAYLRDPNCSSILQTEERNWVSVTSPVQASACRNILERNQTHAIYKNTLSLVNDFIIRDTILNINFQCAYPLDMKVSLQAALQPIVSSLNVSVDGNGEFIVRMALFQDQNYTNPYEGDAVELSVESVLYVGAILEQGDTSRFNLVLRNCYATPTEDKADLVKYFIIRNSCSNQRDSTIHVEENGQSSESRFSVQMFMFAGHYDLVFLHCEIHLCDSLNEQCQPSCSRSQVRSEVPAIDLARVLDLGPITRRGAQSPGVMNGTPSTAGFLVAWPMVLLTVLLAWLF

SEQ ID NO: 116 - protein, 426 aa, Homo sapiens
MGPLPAPSCTQRITWKGLLLTASLLNFWNPPTTAEVTIEAQPPKVSEGKDVLLLVHNLPQNLPGYFWYKGEMTDLYHYIISYIVDGKIIIYGPAYSGRETVYSNASLLIQNVTRKDAGTYTLHIIKRGDETREEIRHFTFTLYLETPKPYISSSNLNPREAMEAVRLICDPETLDASYLWWMNGQSLPVTHRLQLSKTNRTLYLFGVTKYIAGPYECEIRNPVSASRSDPVTLNLLPKLPIPYITINNLNPRENKDVLAFTCEPKSENYTYIWWLNGQSLPVSPGVKRPIENRILILPSVTRNETGPYQCEIRDRYGGLRSNPVILNVLYGPDLPRIYPSFTYYRSGENLDLSCFTESNPPAEYFWTINGKFQQSGQKLFIPQITRNHSGLYACSVHNSATGKEISKSMTVKVSGPCHGDLTESQS

SEQ ID NO: 117 - protein, 328 aa, Homo sapiens
MEKSIWLLACLAWVLPTGSFVRTKIDTTENLLNTEVHSSPAQRWSMQVPPEVSAEAGDAAVLPCTFTHPHRHYDGPLTAIWRAGEPYAGPQVFRCAAARGSELCQTALSLHGRFRLLGNPRRNDLSLRVERLALADDRRYFCRVEFAGDVHDRYESRHGVRLHVTAAPRIVNISVLPSPAHAFRALCTAEGEPPPALAWSGPALGNSLAAVRSPREGHGHLVTAELPALTHDGRYTCTAANSLGRSEASVYLFRFHGASGASTVALLLGALGFKALLLLGVLAARAARRRPEHLDTPDTPPRSQAQESNYENLSQMNPRSPPATMCSP

SEQ ID NO: 118 - protein, 620 aa, Homo sapiens
MSKSKCSVGLMSSVVAPAKEPNAVGPKEVELILVKEQNGVQLTSSTLTNPRQSPVEAQDRETWGKKIDFLLSVIGFAVDLANVWRFPYLCYKNGGGAFLVPYLLFMVIAGMPLFYMELALGQFNREGAAGVWKICPILKGVGFTVILISLYVGFFYNVIIAWALHYLFSSFTTELPWIHCNNSWNSPNCSDAHPGDSSGDSSGLNDTFGTTPAAEYFERGVLHLHQSHGIDDLGPPRWQLTACLVLVIVLLYFSLWKGVKTSGKVVWITATMPYVVLTALLLRGVTLPGAIDGIRAYLSVDFYRLCEASVWIDAATQVCFSLGVGFGVLIAFSSYNKFTNNCYRDAIVTTSINSLTSFSSGFVVFSFLGYMAQKHSVPIGDVAKDGPGLIFIIYPEAIATLPLSSAWAVVFFIMLLTLGIDSAMGGMESVITGLIDEFQLLHRHRELFTLFIVLATFLLSLFCVTNGGIYVFTLLDHFAAGTSILFGVLIEAIGVAWFYGVGQFSDDIQQMTGQRPSLYWRLCWKLVSPCFLLFVVVVSIVTFRPPHYGAYIFPDWANALGWVIATSSMAMVPIYAAYKFCSLPGSFREKLAYAIAPEKDRELVDRGEVRQFTLRHWLKV

SEQ ID NO: 119 - protein, 398 aa, Homo sapiens
MHTVATSGPNASWGAPANASGCPGCGANASDGPVPSPRAVDAWLVPLFFAALMLLGLVGNSLVIYVICRHKPMRTVTNFYIANLAATDVTFLLCCVPFTALLYPLPGWVLGDFMCKFVNYIQQVSVQATCATLTAMSVDRWYVTVFPLRALHRRTPRLALAVSLSIWVGSAAVSAPVLALHRLSPGPRAYCSEAFPSRALERAFALYNLLALYLLPLLATCACYAAMLRHLGRVAVRPAPADSALQGQVLAERAGAVRAKVSRLVAAVVLLFAACWGPIQLFLVLQALGPAGSWHPRSYAAYALKTWAHCMSYSNSALNPLLYAFLGSHFRQAFRRVCPCAPRRPRRPRRPGPSDPAAPHAELLRLGSHPAPARAQKPGSSGLAARGLCVLGEDNAPL

SEQ ID NO: 120 - protein, 431 aa, Homo sapiens
MQALNITPEQFSRLLRDHNLTREQFIALYRLRPLVYTPELPGRAKLALVLTGVLIFALALFGNALVFYVVTRSKAMRTVTNIFICSLALSDLLITFFCIPVTMLQNISDNWLGGAFICKMVPFVQSTAVVTEILTMTCIAVERHQGLVHPFKMKWQYTNRRAFTMLGVVWLVAVIVGSPMWHVQQLEIKYDFLYEKEHICCLEEWTSPVHQKIYTTFILVILFLLPLMVMLILYSKIGYELWIKKRVGDGSVLRTIHGKEMSKIARKKKRAVIMMVTVVALFAVCWAPFHVVHMMIEYSNFEKEYDDVTIKMIFAIVQIIGFSNSICNPIVYAFMNENFKKNVLSAVCYCIVNKTFSPAQRHGNSGITMMRKKAKFSLRENPVEETKGEAFSDGNIEVKLCEQTEEKKKLKRHLALFRSELAENSPLDSGH

SEQ ID NO: 121 - protein, 335 aa, Homo sapiens
MESSFSFGVILAVLASLIIATNTLVAVAVLLLIHKNDGVSLCFTLNLAVADTLIGVAISGLLTDQLSSPSRPTQKTLCSLRMAFVTSSAAASVLTVMLITFDRYLAIKQPFRYLKIMSGFVAGACIAGLWLVSYLIGFLPLGIPMFQQTAYKGQCSFFAVFHPHFVLTLSCVGFFPAMLLFVFFYCDMLKIASMHSQQIRKMEHAGAMAGGYRSPRTPSDFKALRTVSVLIGSFALSWTPFLITGIVQVACQECHLYLVLERYLWLLGVGNSLLNPLIYAYWQKEVRLQLYHMALGVKKVLTSFLLFLSARNCGPERPRESSCHIVTISSSEFDG

SEQ ID NO: 122 - protein, 220 aa, Homo sapiens
MASAGMQILGVVLTLLGWVNGLVSCALPMWKVTAFIGNSIVVAQVVWEGLWMSCVVQSTGQMQCKVYDSLLALPQDLQAARALCVIALLVALFGLLVYLAGAKCTTCVEEKDSKARLVLTSGIVFVISGVLTLIPVCWTAHAIIRDFYNPLVAEAQKRELGASLYLGWAASGLLLLGGGLLCCTCPSGGSQGPSHYMARYSTSAPAISRGPSEYPTKNYV

SEQ ID NO: 123 - protein, 21 aa, Homo sapiens
MALPVTALLLPLALLLHAARP

SEQ ID NO: 124 - protein, 15 aa, Homo sapiens
GGGGSGGGGSGGGGS

SEQ ID NO: 125 - protein, 45 aa, Artificial Sequence
  Synthesized
TTTPAPRPPTPAPTIASQPLSLRPEACRPAAGGAVHTRGLDFACD

SEQ ID NO: 126 - protein, 23 aa, Artificial Sequence
  Synthesized
YIWAPLAGTCGVLLLSLVITLYC

SEQ ID NO: 127 - protein, 42 aa, Artificial Sequence; identical to SEQ ID NO: 3
  Synthesized

SEQ ID NO: 128 - protein, 112 aa, Artificial Sequence; identical to SEQ ID NO: 4
  Synthesized

SEQ ID NO: 129 - protein, 485 aa, Artificial Sequence
  Synthesized
MALPVTALLLPLALLLHAARPQIVLTQSPAIMSASLGERVTMTCTASSVVISTYLHWYQQKPGSSPKLWIYSTSNLASGVPVRFSGSGSGTSYSLTISSMEAEDAATYYCHQYHRSPWTFGGGTKLEIKGGGGSGGGGSGGGGSEVQLQQSGPELVKPGGSMKISCKASGYSFTGYTMNWVKQSHGKNLEWIGLINPYNGGISYNQKFKDKATLTMDKSSSTAYMELLSLTSEDSAIYFCARDYRYEGFDYWGQGTLVTVSATTTPAPRPPTPAPTIASQPLSLRPEACRPAAGGAVHTRGLDFACDIYIWAPLAGTCGVLLLSLVITLYCKRGRKKLLYIFKQPFMRPVQTTQEEDGCSCRFPEEEEGGCELRVKFSRSADAPAYKQGQNQLYNELNLGRREEYDVLDKRRGRDPEMGGKPRRKNPQEGLYNELQKDKMAEAYSEIGMKGERRRGKGHDGLYQGLSTATKDTYDALHMQALPPR

SEQ ID NO: 130 - protein, 241 aa, Artificial Sequence
  Synthesized
QIVLTQSPAIMSASLGERVTMTCTASSVVISTYLHWYQQKPGSSPKLWIYSTSNLASGVPVRFSGSGSGTSYSLTISSMEAEDAATYYCHQYHRSPWTFGGGTKLEIKGGGGSGGGGSGGGGSEVQLQQSGPELVKPGGSMKISCKASGYSFTGYTMNWVKQSHGKNLEWIGLINPYNGGISYNQKFKDKATLTMDKSSSTAYMELLSLTSEDSAIYFCARDYRYEGFDYWGQGTLVTVSA

SEQ ID NO: 131 - protein, 108 aa, Artificial Sequence
  Synthesized
QIVLTQSPAIMSASLGERVTMTCTASSVVISTYLHWYQQKPGSSPKLWIYSTSNLASGVPVRFSGSGSGTSYSLTISSMEAEDAATYYCHQYHRSPWTFGGGTKLEIK

SEQ ID NO: 132 - protein, 118 aa, Artificial Sequence
  Synthesized
EVQLQQSGPELVKPGGSMKISCKASGYSFTGYTMNWVKQSHGKNLEWIGLINPYNGGISYNQKFKDKATLTMDKSSSTAYMELLSLTSEDSAIYFCARDYRYEGFDYWGQGTLVTVSA

SEQ ID NO: 133 - protein, 488 aa, Artificial Sequence
  Synthesized
MALPVTALLLPLALLLHAARPENVLTQSPAIMSATLGEKVTMSCRATSNVKYMYWYQQKSGASPKLWIYYTSNLASGVPARFSGSGSGTSYSLTISSVEAADAATYYCQQFTSSPSTFGAGTKLELKGGGGSGGGGSGGGGSEVQLQQSGPELVKPGASVKISCKASGYSFTGYFMNWVKQSHGKSLEWIGRINPYNGDTFYNQKFKGKATLTVDKSSNTAHMELRSLTSEDSAVYYCARVLFLDFDDPYLMDYWGQGTSVTVSSTTTPAPRPPTPAPTIASQPLSLRPEACRPAAGGAVHTRGLDFACDIYIWAPLAGTCGVLLLSLVITLYCKRGRKKLLYIFKQPFMRPVQTTQEEDGCSCRFPEEEEGGCELRVKFSRSADAPAYKQGQNQLYNELNLGRREEYDVLDKRRGRDPEMGGKPRRKNPQEGLYNELQKDKMAEAYSEIGMKGERRRGKGHDGLYQGLSTATKDTYDALHMQALPPR

SEQ ID NO: 134 - protein, 244 aa, Artificial Sequence
  Synthesized
ENVLTQSPAIMSATLGEKVTMSCRATSNVKYMYWYQQKSGASPKLWIYYTSNLASGVPARFSGSGSGTSYSLTISSVEAADAATYYCQQFTSSPSTFGAGTKLELKGGGGSGGGGSGGGGSEVQLQQSGPELVKPGASVKISCKASGYSFTGYFMNWVKQSHGKSLEWIGRINPYNGDTFYNQKFKGKATLTVDKSSNTAHMELRSLTSEDSAVYYCARVLFLDFDDPYLMDYWGQGTSVTVSS

SEQ ID NO: 135 - protein, 106 aa, Artificial Sequence
  Synthesized
NVLTQSPAIMSATLGEKVTMSCRATSNVKYMYWYQQKSGASPKLWIYYTSNLASGVPARFSGSGSGTSYSLTISSVEAADAATYYCQQFTSSPSTFGAGTKLELKE

SEQ ID NO: 136 - protein, 123 aa, Artificial Sequence
  Synthesized
EVQLQQSGPELVKPGASVKISCKASGYSFTGYFMNWVKQSHGKSLEWIGRINPYNGDTFYNQKFKGKATLTVDKSSNTAHMELRSLTSEDSAVYYCARVLFLDFDDPYLMDYWGQGTSVTVSS

SEQ ID NO: 137 - protein, 485 aa, Artificial Sequence
  Synthesized
MALPVTALLLPLALLLHAARPDIQMTQSPASLSASVGETVTITCRASENIDSYLAWYQQKQGKSPQLLVYASTLLVDGVPSRFSGSRSGTQFSLKINSLQSEDVARYYCQHYYSIPYTFGSGTKLEIKGGGGSGGGGSGGGGSEVKLVESGGGLVKPGGSLKLSCAASGFTFNSYTMSWVRQTPAKRLEWVVTISSGGGRTYYPDSVKGRFTISRDNARNTLYLQMSSLRSEDTAMYYCIRGDYRYDGFAYWGQGTLVTVSTTTTPAPRPPTPAPTIASQPLSLRPEACRPAAGGAVHTRGLDFACDIYIWAPLAGTCGVLLLSLVITLYCKRGRKKLLYIFKQPFMRPVQTTQEEDGCSCRFPEEEEGGCELRVKFSRSADAPAYKQGQNQLYNELNLGRREEYDVLDKRRGRDPEMGGKPRRKNPQEGLYNELQKDKMAEAYSEIGMKGERRRGKGHDGLYQGLSTATKDTYDALHMQALPPR

SEQ ID NO: 138 - protein, 241 aa, Artificial Sequence
  Synthesized
DIQMTQSPASLSASVGETVTITCRASENIDSYLAWYQQKQGKSPQLLVYASTLLVDGVPSRFSGSRSGTQFSLKINSLQSEDVARYYCQHYYSIPYTFGSGTKLEIKGGGGSGGGGSGGGGSEVKLVESGGGLVKPGGSLKLSCAASGFTFNSYTMSWVRQTPAKRLEWVVTISSGGGRTYYPDSVKGRFTISRDNARNTLYLQMSSLRSEDTAMYYCIRGDYRYDGFAYWGQGTLVTVST

SEQ ID NO: 139 - protein, 107 aa, Artificial Sequence
  Synthesized
DIQMTQSPASLSASVGETVTITCRASENIDSYLAWYQQKQGKSPQLLVYASTLLVDGVPSRFSGSRSGTQFSLKINSLQSEDVARYYCQHYYSIPYTFGSGTKLEIK

SEQ ID NO: 140 - protein, 119 aa, Artificial Sequence
  Synthesized
EVKLVESGGGLVKPGGSLKLSCAASGFTFNSYTMSWVRQTPAKRLEWVVTISSGGGRTYYPDSVKGRFTISRDNARNTLYLQMSSLRSEDTAMYYCIRGDYRYDGFAYWGQGTLVTVST

SEQ ID NO: 141 - protein, 488 aa, Artificial Sequence
  Synthesized
MALPVTALLLPLALLLHAARPENVLTQSPAIMSATLGEKVTMSCRATSNVKYMYWYQQKSGASPKLWIYYTSNLASGVPARFSGSGSGTSYSLTISSVEAADAATYYCQQFTSSPSTFGAGTKLELKGGGGSGGGGSGGGGSEVQLQQSGPELVKPGASVKISCKASGYSFTGYFMNWVKQSHGKSLEWIGRINPYNGDTFYNQKFKGKATLTVDKSSSTAHMELRSLTSEDSAVYYCARVLFLDFDDPYLMDYWGQGTSVTVSSTTTPAPRPPTPAPTIASQPLSLRPEACRPAAGGAVHTRGLDFACDIYIWAPLAGTCGVLLLSLVITLYCKRGRKKLLYIFKQPFMRPVQTTQEEDGCSCRFPEEEEGGCELRVKFSRSADAPAYKQGQNQLYNELNLGRREEYDVLDKRRGRDPEMGGKPRRKNPQEGLYNELQKDKMAEAYSEIGMKGERRRGKGHDGLYQGLSTATKDTYDALHMQALPPR

SEQ ID NO: 142 - protein, 244 aa, Artificial Sequence
  Synthesized
ENVLTQSPAIMSATLGEKVTMSCRATSNVKYMYWYQQKSGASPKLWIYYTSNLASGVPARFSGSGSGTSYSLTISSVEAADAATYYCQQFTSSPSTFGAGTKLELKGGGGSGGGGSGGGGSEVQLQQSGPELVKPGASVKISCKASGYSFTGYFMNWVKQSHGKSLEWIGRINPYNGDTFYNQKFKGKATLTVDKSSSTAHMELRSLTSEDSAVYYCARVLFLDFDDPYLMDYWGQGTSVTVSS

SEQ ID NO: 143 - protein, 106 aa, Artificial Sequence
  Synthesized
ENVLTQSPAIMSATLGEKVTMSCRATSNVKYMYWYQQKSGASPKLWIYYTSNLASGVPARFSGSGSGTSYSLTISSVEAADAATYYCQQFTSSPSTFGAGTKLELK

SEQ ID NO: 144 - protein, 123 aa, Artificial Sequence
  Synthesized
EVQLQQSGPELVKPGASVKISCKASGYSFTGYFMNWVKQSHGKSLEWIGRINPYNGDTFYNQKFKGKATLTVDKSSSTAHMELRSLTSEDSAVYYCARVLFLDFDDPYLMDYWGQGTSVTVSS

SEQ ID NO: 145 - protein, 482 aa, Artificial Sequence
  Synthesized
MALPVTALLLPLALLLHAARPSSELTQDPAVSVALGQTVRITCRGDSLRKYYASWYQQKPRQAPQLVIYHKNNRASGIPDRFSGSISGNTASLTITGAQAEDEAAYFCNSRDTSGNYLVFGGGTKVTVLGGGGGSGGGGSGGGGSQLQLQESGPGLVKPSETLSLTCAVSGASISNWWSWVRQPPGKGLEWIGEVHHSGVTTYKPSLKSRVTISVDNSKNQLSLKLTSVTAADTAVYYCAREFADDAFDIWGRGTMVTVTTTPAPRPPTPAPTIASQPLSLRPEACRPAAGGAVHTRGLDFACDIYIWAPLAGTCGVLLLSLVITLYCKRGRKKLLYIFKQPFMRPVQTTQEEDGCSCRFPEEEEGGCELRVKFSRSADAPAYKQGQNQLYNELNLGRREEYDVLDKRRGRDPEMGGKPRRKNPQEGLYNELQKDKMAEAYSEIGMKGERRRGKGHDGLYQGLSTATKDTYDALHMQALPPR

SEQ ID NO: 146 - protein, 238 aa, Artificial Sequence
  Synthesized
SSELTQDPAVSVALGQTVRITCRGDSLRKYYASWYQQKPRQAPQLVIYHKNNRASGIPDRFSGSISGNTASLTITGAQAEDEAAYFCNSRDTSGNYLVFGGGTKVTVLGGGGGSGGGGSGGGGSQLQLQESGPGLVKPSETLSLTCAVSGASISNWWSWVRQPPGKGLEWIGEVHHSGVTTYKPSLKSRVTISVDNSKNQLSLKLTSVTAADTAVYYCAREFADDAFDIWGRGTMVTV

SEQ ID NO: 147 - protein, 109 aa, Artificial Sequence
  Synthesized
SSELTQDPAVSVALGQTVRITCRGDSLRKYYASWYQQKPRQAPQLVIYHKNNRASGIPDRFSGSISGNTASLTITGAQAEDEAAYFCNSRDTSGNYLVFGGGTKVTVLG

SEQ ID NO: 148 - protein, 114 aa, Artificial Sequence
  Synthesized
QLQLQESGPGLVKPSETLSLTCAVSGASISNWWSWVRQPPGKGLEWIGEVHHSGVTTYKPSLKSRVTISVDNSKNQLSLKLTSVTAADTAVYYCAREFADDAFDIWGRGTMVTV

SEQ ID NO: 149 - protein, 250 aa, Artificial Sequence
  Synthesized
DIVMTQSPLSLPVTPGEPASISCRSTKSLLHSNGNTYLYWYLQKPGQSPQLLIYRMSNLASGVPDRFSGSGSGTDFTLKISRVEAEDVGVYYCMQHLEYPFTFGGGTKVEIKGGGGSGGGGSGGGGSEIQLQQSGAEVKKPGSSVKVSCKASGYTFTDYDMHWVRQAPGQGLEWMGTIDPETGGTAYNQKFKGRVTITADKSTSTAYMELSSLRSEDTAVYYCTSFYYTYSNYDVGFAYWGQGTLVTVSS

SEQ ID NO: 150 - protein, 250 aa, Artificial Sequence
  Synthesized
DIVMTQSPLSLPVTPGEPASISCRSTKSLLHSNGNTYLYWYLQKPGQSPQLLIYRMSNLASGVPDRFSGSGSGTDFTLKISRVEAEDVGVYYCMQHLEYPFTFGGGTKVEIKGGGGSGGGGSGGGGSEIQLQQSGAEVKKPGSSVKVSCKASGYTFTDYDMHWVRQAPGQGLEWIGTIDPETGGTAYNQKFKGRATLTADRSTSTAYMELSSLRSEDTAVYYCTSFYYTYSNYDVGFAYWGQGTLVTVSS

SEQ ID NO: 151 - protein, 250 aa, Artificial Sequence
  Synthesized
DIVMTQSPLSLPVTPGEPASISCRSTKSLLHSNGNTYLYWYLQKPGQSPQLLIYRMSNLASGVPDRFSGSGSGTDFTLKISRVEAEDVGVYYCMQHLEYPFTFGGGTKVEIKGGGGSGGGGSGGGGSEIQLQQSGAEVKKPGSSVKVSCKASGYTFTDYDMHWVKQAPGQGLEWIGTIDPETGGTAYNQKFKGKATLTADRSTSTAYMELSSLRSEDTAVYYCTSFYYTYSNYDVGFAYWGQGTLVTVSS

SEQ ID NO: 152 - protein, 250 aa, Artificial Sequence
  Synthesized
DIVMTQSPLSLPVTPGEPASISCRSTKSLLHSNGNTYLYWYLQKPGQSPQLLIYRMSNLASGVPDRFSGSGSGTDFTLKISRVEAEDVGVYYCMQHLEYPFTFGGGTKVEIKGGGGSGGGGSGGGGSEIQLQQSGAEVKKPGSSVKVSCKASGYTFTDYDMHWVKQAPGHGLEWIGTIDPETGGTAYNQKFKGKATLTADRSTSTAYMELSSLTSEDTAVYYCTSFYYTYSNYDVGFAYWGQGTLVTVSS

SEQ ID NO: 153 - protein, 250 aa, Artificial Sequence
  Synthesized
DIVMTQSPLSLPVTPGEPASISCRSTKSLLHSNGNTYLYWFLQKPGQSPQLLIYRMSNLASGVPDRFSGSGSGTDFTLKISRVEAEDVGVYYCMQHLEYPFTFGGGTKVEIKGGGGSGGGGSGGGGSEIQLQQSGAEVKKPGSSVKVSCKASGYTFTDYDMHWVRQAPGQGLEWMGTIDPETGGTAYNQKFKGRVTITADKSTSTAYMELSSLRSEDTAVYYCTSFYYTYSNYDVGFAYWGQGTLVTVSS

SEQ ID NO: 154 - protein, 250 aa, Artificial Sequence
  Synthesized
DIVMTQSPLSLPVTPGEPASISCRSTKSLLHSNGNTYLYWFLQKPGQSPQLLIYRMSNLASGVPDRFSGSGSGTDFTLKISRVEAEDVGVYYCMQHLEYPFTFGGGTKVEIKGGGGSGGGGSGGGGSEIQLQQSGAEVKKPGSSVKVSCKASGYTFTDYDMHWVRQAPGQGLEWIGTIDPETGGTAYNQKFKGRATLTADRSTSTAYMELSSLRSEDTAVYYCTSFYYTYSNYDVGFAYWGQGTLVTVSS

SEQ ID NO: 155 - protein, 250 aa, Artificial Sequence
  Synthesized
DIVMTQSPLSLPVTPGEPASISCRSTKSLLHSNGNTYLYWFLQKPGQSPQLLIYRMSNLASGVPDRFSGSGSGTDFTLKISRVEAEDVGVYYCMQHLEYPFTFGGGTKVEIKGGGGSGGGGSGGGGSEIQLQQSGAEVKKPGSSVKVSCKASGYTFTDYDMHWVKQAPGQGLEWIGTIDPETGGTAYNQKFKGKATLTADRSTSTAYMELSSLRSEDTAVYYCTSFYYTYSNYDVGFAYWGQGTLVTVSS

SEQ ID NO: 156 - protein, 250 aa, Artificial Sequence
  Synthesized
DIVMTQSPLSLPVTPGEPASISCRSTKSLLHSNGNTYLYWFLQKPGQSPQLLIYRMSNLASGVPDRFSGSGSGTDFTLKISRVEAEDVGVYYCMQHLEYPFTFGGGTKVEIKGGGGSGGGGSGGGGSEIQLQQSGAEVKKPGSSVKVSCKASGYTFTDYDMHWVKQAPGHGLEWIGTIDPETGGTAYNQKFKGKATLTADRSTSTAYMELSSLTSEDTAVYYCTSFYYTYSNYDVGFAYWGQGTLVTVSS

SEQ ID NO: 157 - protein, 112 aa, Artificial Sequence
  Synthesized
DIVMTQSPLSLPVTPGEPASISCRSTKSLLHSNGNTYLYWYLQKPGQSPQLLIYRMSNLASGVPDRFSGSGSGTDFTLKISRVEAEDVGVYYCMQHLEYPFTFGGGTKVEIK

SEQ ID NO: 158 - protein, 112 aa, Artificial Sequence
  Synthesized
DIVMTQSPLSLPVTPGEPASISCRSTKSLLHSNGNTYLYWFLQKPGQSPQLLIYRMSNLASGVPDRFSGSGSGTDFTLKISRVEAEDVGVYYCMQHLEYPFTFGGGTKVEIK

SEQ ID NO: 159 - protein, 123 aa, Artificial Sequence
  Synthesized
EIQLQQSGAEVKKPGSSVKVSCKASGYTFTDYDMHWVRQAPGQGLEWMGTIDPETGGTAYNQKFKGRVTITADKSTSTAYMELSSLRSEDTAVYYCTSFYYTYSNYDVGFAYWGQGTLVTVSS

SEQ ID NO: 160 - protein, 123 aa, Artificial Sequence
  Synthesized
EIQLQQSGAEVKKPGSSVKVSCKASGYTFTDYDMHWVRQAPGQGLEWIGTIDPETGGTAYNQKFKGRATLTADRSTSTAYMELSSLRSEDTAVYYCTSFYYTYSNYDVGFAYWGQGTLVTVSS

SEQ ID NO: 161 - protein, 123 aa, Artificial Sequence
  Synthesized
EIQLQQSGAEVKKPGSSVKVSCKASGYTFTDYDMHWVKQAPGQGLEWIGTIDPETGGTAYNQKFKGKATLTADRSTSTAYMELSSLRSEDTAVYYCTSFYYTYSNYDVGFAYWGQGTLVTVSS

SEQ ID NO: 162 - protein, 123 aa, Artificial Sequence
  Synthesized
EIQLQQSGAEVKKPGSSVKVSCKASGYTFTDYDMHWVKQAPGHGLEWIGTIDPETGGTAYNQKFKGKATLTADRSTSTAYMELSSLTSEDTAVYYCTSFYYTYSNYDVGFAYWGQGTLVTVSS

SEQ ID NO: 163 - protein, 482 aa, Artificial Sequence
  Synthesized
MALPVTALLLPLALLLHAARPDIQMTQSPSSLSASVGDRVTITCKASDLIHNWLAWYQQKPGKAPKLLIYGATSLETGVPSRFSGSGSGTDFTLTISSLQPEDFATYYCQQYWTTPFTFGQGTKVEIKGGGGSGGGGSGGGGSEVQLVESGGGLVQPGGSLRLSCAASGYSITNDYAWNWVRQAPGKGLEWVGYISYSGYTTYNPSLKSRFTISRDTSKNTLYLQMNSLRAEDTAVYYCARWTSGLDYWGQGTLVTVSSTTTPAPRPPTPAPTIASQPLSLRPEACRPAAGGAVHTRGLDFACDIYIWAPLAGTCGVLLLSLVITLYCKRGRKKLLYIFKQPFMRPVQTTQEEDGCSCRFPEEEEGGCELRVKFSRSADAPAYKQGQNQLYNELNLGRREEYDVLDKRRGRDPEMGGKPRRKNPQEGLYNELQKDKMAEAYSEIGMKGERRRGKGHDGLYQGLSTATKDTYDALHMQALPPR

SEQ ID NO: 164 - protein, 238 aa, Artificial Sequence
  Synthesized
DIQMTQSPSSLSASVGDRVTITCKASDLIHNWLAWYQQKPGKAPKLLIYGATSLETGVPSRFSGSGSGTDFTLTISSLQPEDFATYYCQQYWTTPFTFGQGTKVEIKGGGGSGGGGSGGGGSEVQLVESGGGLVQPGGSLRLSCAASGYSITNDYAWNWVRQAPGKGLEWVGYISYSGYTTYNPSLKSRFTISRDTSKNTLYLQMNSLRAEDTAVYYCARWTSGLDYWGQGTLVTVSS

SEQ ID NO: 165 - protein, 107 aa, Artificial Sequence
  Synthesized
DIQMTQSPSSLSASVGDRVTITCKASDLIHNWLAWYQQKPGKAPKLLIYGATSLETGVPSRFSGSGSGTDFTLTISSLQPEDFATYYCQQYWTTPFTFGQGTKVEIK

SEQ ID NO: 166 - protein, 116 aa, Artificial Sequence
  Synthesized
EVQLVESGGGLVQPGGSLRLSCAASGYSITNDYAWNWVRQAPGKGLEWVGYISYSGYTTYNPSLKSRFTISRDTSKNTLYLQMNSLRAEDTAVYYCARWTSGLDYWGQGTLVTVSS

SEQ ID NO: 167 - protein, 482 aa, Artificial Sequence
  Synthesized
MALPVTALLLPLALLLHAARPDIQMTQSSSFLSVSLGGRVTITCKASDLIHNWLAWYQQKPGNAPRLLISGATSLETGVPSRFSGSGSGNDYTLSIASLQTEDAATYYCQQYWTTPFTFGSGTKVEIKGGGGSGGGGSGGGGSDVQLQESGPGLVNPSQSLSLTCTVTGYSITNDYAWNWIRQFPGNKLEWMGYINYSGYTTYNPSLKSRISITRDTSKNQFFLHLNSVTTEDTATYYCARWDGGLTYWGQGTLVTVSATTTPAPRPPTPAPTIASQPLSLRPEACRPAAGGAVHTRGLDFACDIYIWAPLAGTCGVLLLSLVITLYCKRGRKKLLYIFKQPFMRPVQTTQEEDGCSCRFPEEEEGGCELRVKFSRSADAPAYKQGQNQLYNELNLGRREEYDVLDKRRGRDPEMGGKPRRKNPQEGLYNELQKDKMAEAYSEIGMKGERRRGKGHDGLYQGLSTATKDTYDALHMQALPPR

SEQ ID NO: 168 - protein, 238 aa, Artificial Sequence
  Synthesized
DIQMTQSSSFLSVSLGGRVTITCKASDLIHNWLAWYQQKPGNAPRLLISGATSLETGVPSRFSGSGSGNDYTLSIASLQTEDAATYYCQQYWTTPFTFGSGTKVEIKGGGGSGGGGSGGGGSDVQLQESGPGLVNPSQSLSLTCTVTGYSITNDYAWNWIRQFPGNKLEWMGYINYSGYTTYNPSLKSRISITRDTSKNQFFLHLNSVTTEDTATYYCARWDGGLTYWGQGTLVTVSA

SEQ ID NO: 169 - protein, 107 aa, Artificial Sequence
  Synthesized
DIQMTQSSSFLSVSLGGRVTITCKASDLIHNWLAWYQQKPGNAPRLLISGATSLETGVPSRFSGSGSGNDYTLSIASLQTEDAATYYCQQYWTTPFTFGSGTKVEIK

SEQ ID NO: 170 - protein, 116 aa, Artificial Sequence
  Synthesized
DVQLQESGPGLVNPSQSLSLTCTVTGYSITNDYAWNWIRQFPGNKLEWMGYINYSGYTTYNPSLKSRISITRDTSKNQFFLHLNSVTTEDTATYYCARWDGGLTYWGQGTLVTVSA

SEQ ID NO: 171 - protein, 298 aa, Artificial Sequence
  Synthesized
MALPVTALLLPLALLLHAARPGTSLSPPPESSGSPQQPGLSAPHSRQIPAPQGAVLVQREKDLPNYNWNSFGLRFTTTPAPRPPTPAPTIASQPLSLRPEACRPAAGGAVHTRGLDFACDIYIWAPLAGTCGVLLLSLVITLYCKRGRKKLLYIFKQPFMRPVQTTQEEDGCSCRFPEEEEGGCELRVKFSRSADAPAYKQGQNQLYNELNLGRREEYDVLDKRRGRDPEMGGKPRRKNPQEGLYNELQKDKMAEAYSEIGMKGERRRGKGHDGLYQGLSTATKDTYDALHMQALPPR

SEQ ID NO: 172 - protein, 54 aa, Artificial Sequence
  Synthesized
GTSLSPPPESSGSPQQPGLSAPHSRQIPAPQGAVLVQREKDLPNYNWNSFGLRF

SEQ ID NO: 173 - protein, 19 aa, Artificial Sequence
  Synthesized
GTTGCTCCAGGCCACAGCA

SEQ ID NO: 174 - protein, 7 aa, Artificial Sequence
  Synthesized
QSGDLTR

SEQ ID NO: 175 - protein, 7 aa, Artificial Sequence
  Synthesized
QWGTRYR

SEQ ID NO: 176 - protein, 7 aa, Artificial Sequence
  Synthesized
ERGTLAR

SEQ ID NO: 177 - protein, 7 aa, Artificial Sequence
  Synthesized
RSDNLRE

SEQ ID NO: 178 - protein, 7 aa, Artificial Sequence
  Synthesized
QSGDLTR

SEQ ID NO: 179 - protein, 7 aa, Artificial Sequence
  Synthesized
TSGALTR

SEQ ID NO: 180 - protein, 12 aa, Artificial Sequence
  Synthesized
GACTTTGCATGT

SEQ ID NO: 181 - protein, 7 aa, Artificial Sequence
  Synthesized
WRSSLAS

SEQ ID NO: 182 - protein, 7 aa, Artificial Sequence
  Synthesized
QSGSLTR

SEQ ID NO: 183 - protein, 7 aa, Artificial Sequence
  Synthesized
HKWVLRQ

SEQ ID NO: 184 - protein, 7 aa, Artificial Sequence
  Synthesized
DRSNLTR

SEQ ID NO: 185 - protein, 293 aa, Artificial Sequence
  Synthesized
MQRISSLIHLSLFWAGVMSAIELVPEHQTVPVSIGVPATLRCSMKGEAIGNYYINWYRKTQGNTITFIYREKDIYGPGFKDNFQGDIDIAKNLAVLKILAPSERDEGSYYCACDTMGHPRGKLIFGKGTRVTVEPRSQPHTKPSVFVMKNGTNVACLVKEFYPKDIRINLVSSKKITEFDPAIVISPSGKYNAVKLGKYEDSNSVTCSVQHDNKTVHSTDFEVKTDSTDHVKPKETENTKQPSKSCHKPKAIVHTEKVNMMSLTVLGLRMLFAKTVAVNFLLTAKLFFLTRDC

SEQ ID NO: 186 - protein, 315 aa, Artificial Sequence
  Synthesized
MVSLLHASTLAVLGALCVYGAGHLEQPQISSTKTLSKTARLECVVSGITISATSVYWYRERPGEVIQFLVSISYDGTVRKESGIPSGKFEVDRIPETSTSTLTIHNVEKQDIATYYCALWEAQQELGKKIKVFGPGTKLIITDKQLDADVSPKPTIFLPSIAETKLQKAGTYLCLLEKFFPDVIKIHWEEKKSNTILGSQEGNTMKTNDTYMKFSWLTVPEKSLDKEHRCIVRHENNKNGVDQEIIFPPIKTDVITMDPKDNCSKDANDTLLLQLTNTSAYYMYLLLLLKSVVYFAIITCCLLRRTAFCCNGEKS

SEQ ID NO: 187 - protein, 292 aa, Artificial Sequence
  Synthesized
MERISSLIHLSLFWAGVMSAIELVPEHQTVPVSIGVPATLRCSMKGEAIGNYYINWYRKTQGNTMTFIYREKDIYGPGFKDNFQGDIDIAKNLAVLKILAPSERDEGSYYCACDTLGMGGEYTDKLIFGKGTRVTVEPRSQPHTKPSVFVMKNGTNVACLVKEFYPKDIRINLVSSKKITEFDPAIVISPSGKYNAVKLGKYEDSNSVTCSVQHDNKTVHSTDFEVKTDSTDHVKPKETENTKQPSKSCHKPKAIVHTEKVNMMSLTVLGLRMLFAKTVAVNFLLTAKLFFL

SEQ ID NO: 188 - protein, 313 aa, Artificial Sequence
  Synthesized
MVSLLHASTLAVLGALCVYGAGHLEQPQISSTKTLSKTARLECVVSGITISATSVYWYRERPGEVIQFLVSISYDGTVRKESGIPSGKFEVDRIPETSTSTLTIHNVEKQDIATYYCALWEWELGKKIKVFGPGTKLIITDKQLDADVSPKPTIFLPSIAETKLQKAGTYLCLLEKFFPDVIKIHWEEKKSNTILGSQEGNTMKTNDTYMKFSWLTVPEKSLDKEHRCIVRHENNKNGVDQEIIFPPIKTDVITMDPKDNCSKDANDTLLLQLTNTSAYYMYLLLLLKSVVYFAIITCCLLRRTAFCCNGEKS

SEQ ID NO: 189 - protein, 288 aa, Artificial Sequence
  Synthesized
MERISSLIHLSLFWAGVMSAIELVPEHQTVPVSIGVPATLRCSMKGEAIGNYYINWYRKTQGNTMTFIYREKDIYGPGFKDNFQGDIDIAKNLAVLKILAPSERDEGSYYCACDTLVSTDKLIFGKGTRVTVEPRSQPHTKPSVFVMKNGTNVACLVKEFYPKDIRINLVSSKKITEFDPAIVISPSGKYNAVKLGKYEDSNSVTCSVQHDNKTVHSTDFEVKTDSTDHVKPKETENTKQPSKSCHKPKAIVHTEKVNMMSLTVLGLRMLFAKTVAVNFLLTAKLFFL

SEQ ID NO: 190 - protein, 314 aa, Artificial Sequence
  Synthesized
MVSLLHASTLAVLGALCVYGAGHLEQPQISSTKTLSKTARLECVVSGITISATSVYWYRERPGEVIQFLVSISYDGTVRKESGIPSGKFEVDRIPETSTSTLTIHNVEKQDIATYYCALWEVGELGKKIKVFGPGTKLIITDKQLDADVSPKPTIFLPSIAETKLQKAGTYLCLLEKFFPDVIKIHWEEKKSNTILGSQEGNTMKTNDTYMKFSWLTVPEKSLDKEHRCIVRHENNKNGVDQEIIFPPIKTDVITMDPKDNCSKDANDTLLLQLTNTSAYYMYLLLLLKSVVYFAIITCCLLRRTAFCCNGEKS

SEQ ID NO: 191 - protein, 291 aa, Artificial Sequence
  Synthesized
MERISSLIHLSLFWAGVMSAIELVPEHQTVPVSIGVPATLRCSMKGEAIGNYYINWYRKTQGNTMTFIYREKDIYGPGFKDNFQGDIDIAKNLAVLKILAPSERDEGSYYCACDTVAHGGGTDKLIFGKGTRVTVEPRSQPHTKPSVFVMKNGTNVACLVKEFYPKDIRINLVSSKKITEFDPAIVISPSGKYNAVKLGKYEDSNSVTCSVQHDNKTVHSTDFEVKTDSTDHVKPKETENTKQPSKSCHKPKAIVHTEKVNMMSLTVLGLRMLFAKTVAVNFLLTAKLFFL

SEQ ID NO: 192 - protein, 313 aa, Artificial Sequence; identical to SEQ ID NO: 188
  Synthesized

SEQ ID NO: 193 - protein, 291 aa, Artificial Sequence
  Synthesized
MERISSLIHLSLFWAGVMSAIELVPEHQTVPVSIGVPATLRCSMKGEAIGNYYINWYRKTQGNTMTFIYREKDIYGPGFKDNFQGDIDIAKNLAVLKILAPSERDEGSYYCACDNLSTGGYTDKLIFGKGTRVTVEPRSQPHTKPSVFVMKNGTNVACLVKEFYPKDIRINLVSSKKITEFDPAIVISPSGKYNAVKLGKYEDSNSVTCSVQHDNKTVHSTDFEVKTDSTDHVKPKETENTKQPSKSCHKPKAIVHTEKVNMMSLTVLGLRMLFAKTVAVNFLLTAKLFFL

SEQ ID NO: 194 - protein, 316 aa, Artificial Sequence
  Synthesized
MVSLLHASTLAVLGALCVYGAGHLEQPQISSTKTLSKTARLECVVSGITISATSVYWYRERPGEVIQFLVSISYDGTVRKESGIPSGKFEVDRIPETSTSTLTIHNVEKQDIATYYCALWEVYQGELGKKIKVFGPGTKLIITDKQLDADVSPKPTIFLPSIAETKLQKAGTYLCLLEKFFPDVIKIHWEEKKSNTILGSQEGNTMKTNDTYMKFSWLTVPEKSLDKEHRCIVRHENNKNGVDQEIIFPPIKTDVITMDPKDNCSKDANDTLLLQLTNTSAYYMYLLLLLKSVVYFAIITCCLLRRTAFCCNGEKS

SEQ ID NO: 195 - protein, 291 aa, Artificial Sequence
  Synthesized
MERISSLIHLSLFWAGVMSAIELVPEHQTVPVSIGVPATLRCSMKGEAIGNYYINWYRKTQGNTMTFIYREKDIYGPGFKDNFQGDIDIAKNLAVLKILAPSERDEGSYYCACDILGEKPYTDKLIFGKGTRVTVEPRSQPHTKPSVFVMKNGTNVACLVKEFYPKDIRINLVSSKKITEFDPAIVISPSGKYNAVKLGKYEDSNSVTCSVQHDNKTVHSTDFEVKTDSTDHVKPKETENTKQPSKSCHKPKAIVHTEKVNMMSLTVLGLRMLFAKTVAVNFLLTAKLFFL

SEQ ID NO: 196 - DNA, 339 bp, Artificial Sequence; identical to SEQ ID NO: 41
  Synthesized

SEQ ID NO: 197 - protein, 276 aa, Artificial Sequence
  Synthesized
MKKHLTTFLVILWLYFYRGNGKNQVEQSPQSLIILEGKNCTLQCNYTVSPFSNLRWYKQDTGRGPVSLTIMTFSENTKSNGRYTATLDADTKQSSLHITASQLSDSASYICVVSDRGSTLGRLYFGRGTQLTVWPDIQNPDPAVYQLRDSKSSDKSVCLFTDFDSQTNVSQSKDSDVYITDKTVLDMRSMDFKSNSAVAWSNKSDFACANAFNNSIIPEDTFFPSPESSCDVKLVEKSFETDTNLNFQNLSVIGFRILLLKVAGFNLLMTLRLWSS

SEQ ID NO: 198 - protein, 313 aa, Artificial Sequence
  Synthesized
MTIRLLCYVGFYFLGAGLMEADIYQTPRYLVIGTGKKITLECSQTMGHDKMYWYQQDPGMELHLIHYSYGVNSTEKGDLSSESTVSRIRTEHFPLTLESARPSHTSQYLCASSGLRDRGLYEQYFGPGTRLTVTEDLKNVFPPEVAVFEPSEAEISHTQKATLVCLATGFYPDHVELSWWVNGKEVHSGVSTDPQPLKEQPALNDSRYCLSSRLRVSATFWQNPRNHFRCQVQFYGLSENDEWTQDRAKPVTQIVSAEAWGRADCGFTSESYQQGVLSATILYEILLGKATLYAVLVSALVLMAMVKRKDSRG

SEQ ID NO: 199 - protein, 267 aa, Artificial Sequence
  Synthesized
MWGVFLLYVSMKMGGTTGQNIDQPTEMTATEGAIVQINCTYQTSGFNGLFWYQQHAGEAPTFLSYNVLDGLEEKGRFSSFLSRSKGYSYLLLKELQMKDSASYLCAVKDSNYQLIWGAGTKLIIKPNIQNPDPAVYQLRDSKSSDKSVCLFTDFDSQTNVSQSKDSDVYITDKTVLDMRSMDFKSNSAVAWSNKSDFACANAFNNSIIPEDTFFPSPESSCDVKLVEKSFETDTNLNFQNLSVIGFRILLLKVAGFNLLMTLRLWSS

SEQ ID NO: 200 - protein, 138 aa, Artificial Sequence
  Synthesized
MAVLVLLLCLLIFPSCVLSQVQLKESGPGLVQPSQTLSLTCTVSGSSLTSNSVSWIRQPPGKGLEWMGVIWSNGDADYNSAIKSRLSISRDTSKSQVFLKMNSLQTEDTAMYFCASPYYGYYFPFDYWGQGVMVTVSS

SEQ ID NO: 201 - DNA, 3533 bp, Artificial Sequence
  Synthesized
atggccttaccagtgaccgccttgctcctgccgctggccttgctgctccacgccgccaggccggatattgtgatgacccagtccccgtcctccctgaccgtgaccgcgggcgaaaaagtgaccatgatttgcaaatcctcccagtccctgctgaattccggcgatcagaaaaattatctgacctggtatcagcagaaaccgggccagccgccgaaactgctgattttttgggcgtccacccgtgaatccggcgtgccggatcgttttaccggctccggctccggcaccgattttaccctgaccatttcctccgtgcaggcggaagatctggcggtgtattattgccagaatgattattcctatccgctgacctttggcgcgggcaccaaactggaactgaaaggcggcggcggctccggcggcggcggctccggcggcggcggctcccaggtgcagctgcagcagtccgatgcggaactggtgaaaccgggctcctccgtgaaaatttcctgcaaagcgtccggctatacctttaccgatcatgcgattcattgggtgaaacagaaaccggaacagggcctggaatggattggccatttttccccgggcaataccgatattaaatataatgataaatttaaaggcaaagcgaccctgaccgtggatcgttcctcctccaccgcgtatatgcagctgaattccctgacctccgaagattccgcggtgtatttttgcaaaacctccacctttttttttgattattggggccagggcaccaccctgaccgtgtcctccaccacgacgccagcgccgcgaccaccaacaccggcgcccaccatcgcgtcgcagcccctgtccctgcgcccagaggcgtgccggccagcggcggggggcgcagtgcacacgagggggctggacttcgcctgtgatatctacatctgggcgcccttggccgggacttgtggggtccttctcctgtcactggttatcaccctttactgcaaacggggcagaaagaaactcctgtatatattcaaacaaccatttatgagaccagtacaaactactcaagaggaagatggctgtagctgccgatttccagaagaagaagaaggaggatgtgaactgagagtgaagttcagcaggagcgcagacgcccccgcgtacaagcagggccagaaccagctctataacgagctcaatctaggacgaagagaggagtacgatgttttggacaagaggcgtggccgggaccctgagatggggggaaagccgagaaggaagaaccctcaggaaggcctgtacaatgaactgcagaaagataagatggcggaggcctacagtgagattgggatgaaaggcgagcgccggaggggcaaggggcacgatggcctttaccagggtctcagtacagccaccaaggacacctacgacgcccttcacatgcaggccctgccccctcgctaatctagaggcgcgcccctctccctcccccccccctaacgttactggccgaagccgcttggaataaggccggtgtgcgtttgtctatatgttattttccaccatattgccgtcttttggcaatgtgagggcccggaaacctggccctgtcttcttgacgagcattcctaggggtctttcccctctcgccaaaggaatgcaaggtctgttgaatgtcgtgaaggaagcagttcctctggaagcttcttgaagacaaacaacgtctgtagcgaccctttgcaggcagcggaaccccccacctggcgacaggtgcctctgcggccaaaagccacgtgtataagatacacctgcaaaggcggcacaaccccagtgccacgttgtgagttggatagttgtggaaagagtcaaatggctctcctcaagcgtattcaacaaggggctgaaggatgcccagaaggtaccccattgtatgggatctgatctggggcctcggtacacatgctttacatgtgtttagtcgaggttaaaaaaacgtctaggccccccgaaccacggggacgtggttttcctttgaaaaacacgatgataatatggccacaacccatatgatggccttaccagtgaccgccttgctcctgccgctggccttgctgctccacgccgccaggccggacatccagatgacacagactacatcctccctgtctgcctctctgggagacagagtcaccatcagttgcagggcaagtcaggacattagtaaatatttaaattggtatcagcagaaaccagatggaactgttaaactcctgatctaccatacatcaagattacactcaggagtcccatcaaggttcagtggcagtgggtctggaacagattattctctcaccattagcaacctggagcaagaagatattgccacttacttttgccaacagggtaatacgcttccgtacacgttcggaggggggaccaagctggagatcacaggtggcggtggctcgggcggtggtgggtcgggtggcggcggatctgaggtgaaactgcaggagtcaggacctggcctggtggcgccctcacagagcctgtccgtcacatgcactgtctcaggggtctcattacccgactatggtgtaagctggattcgccagcctccacgaaagggtctggagtggctgggagtaatatggggtagtgaaaccacatactataattcagctctcaaatccagactgaccatcatcaaggacaactccaagagccaagttttcttaaaaatgaacagtctgcaaactgatgacacagccatttactactgtgccaaacattattactacggtggtagctatgctatggactactggggccaaggaacctcagtcaccgtctcctcaaccacgacgccagcgccgcgaccaccaacaccggcgcccaccatcgcgtcgcagcccctgtccctgcgcccagaggcgtgccggccagcggcggggggcgcagtgcacacgagggggctggacttcgcctgtgatatctacatctgggcgcccttggccgggacttgtggggtccttctcctgtcactggttatcaccctttactgcaaacggggcagaaagaaactcctgtatatattcaaacaaccatttatgagaccagtacaaactactcaagaggaagatggctgtagctgccgatttccagaagaagaagaaggaggatgtgaactgagagtgaagttcagcaggagcgcagacgcccccgcgtacaagcagggccagaaccagctctataacgagctcaatctaggacgaagagaggagtacgatgttttggacaagaggcgtggccgggaccctgagatggggggaaagccgagaaggaagaaccctcaggaaggcctgtacaatgaactgcagaaagataagatggcggaggcctacagtgagattgggatgaaaggcgagcgccggaggggcaaggggcacgatggcctttaccagggtctcagtacagccaccaaggacacctacgacgcccttcacatgcaggccctgccccctcgctaa

SEQ ID NO: 202 - protein, 488 aa, Artificial Sequence
  Synthesized
MALPVTALLLPLALLLHAARPDIVMTQSPSSLTVTAGEKVTMICKSSQSLLNSGDQKNYLTWYQQKPGQPPKLLIFWASTRESGVPDRFTGSGSGTDFTLTISSVQAEDLAVYYCQNDYSYPLTFGAGTKLELKGGGGSGGGGSGGGGSQVQLQQSDAELVKPGSSVKISCKASGYTFTDHAIHWVKQKPEQGLEWIGHFSPGNTDIKYNDKFKGKATLTVDRSSSTAYMQLNSLTSEDSAVYFCKTSTFFFDYWGQGTTLTVSSTTTPAPRPPTPAPTIASQPLSLRPEACRPAAGGAVHTRGLDFACDIYIWAPLAGTCGVLLLSLVITLYCKRGRKKLLYIFKQPFMRPVQTTQEEDGCSCRFPEEEEGGCELRVKFSRSADAPAYQQGQNQLYNELNLGRREEYDVLDKRRGRDPEMGGKPRRKNPQEGLYNELQKDKMAEAYSEIGMKGERRRGKGHDGLYQGLSTATKDTYDALHMQALPPR

SEQ ID NO: 203 - protein, 486 aa, Artificial Sequence
  Synthesized
MALPVTALLLPLALLLHAARPDIQMTQTTSSLSASLGDRVTISCRASQDISKYLNWYQQKPDGTVKLLIYHTSRLHSGVPSRFSGSGSGTDYSLTISNLEQEDIATYFCQQGNTLPYTFGGGTKLEITGGGGSGGGGSGGGGSEVKLQESGPGLVAPSQSLSVTCTVSGVSLPDYGVSWIRQPPRKGLEWLGVIWGSETTYYNSALKSRLTIIKDNSKSQVFLKMNSLQTDDTAIYYCAKHYYYGGSYAMDYWGQGTSVTVSSTTTPAPRPPTPAPTIASQPLSLRPEACRPAAGGAVHTRGLDFACDIYIWAPLAGTCGVLLLSLVITLYCKRGRKKLLYIFKQPFMRPVQTTQEEDGCSCRFPEEEEGGCELRVKFSRSADAPAYQQGQNQLYNELNLGRREEYDVLDKRRGRDPEMGGKPRRKNPQEGLYNELQKDKMAEAYSEIGMKGERRRGKGHDGLYQGLSTATKDTYDALHMQALPPR

SEQ ID NO: 204 - DNA, 3524 bp, Artificial Sequence
  Synthesized
atggccttaccagtgaccgccttgctcctgccgctggccttgctgctccacgccgccaggccggatattgtgatgacccagtccccgtcctccctgaccgtgaccgcgggcgaaaaagtgaccatgatttgcaaatcctcccagtccctgctgaattccggcgatcagaaaaattatctgacctggtatcagcagaaaccgggccagccgccgaaactgctgattttttgggcgtccacccgtgaatccggcgtgccggatcgttttaccggctccggctccggcaccgattttaccctgaccatttcctccgtgcaggcggaagatctggcggtgtattattgccagaatgattattcctatccgctgacctttggcgcgggcaccaaactggaactgaaaggcggcggcggctccggcggcggcggctccggcggcggcggctcccaggtgcagctgcagcagtccgatgcggaactggtgaaaccgggctcctccgtgaaaatttcctgcaaagcgtccggctatacctttaccgatcatgcgattcattgggtgaaacagaaaccggaacagggcctggaatggattggccatttttccccgggcaataccgatattaaatataatgataaatttaaaggcaaagcgaccctgaccgtggatcgttcctcctccaccgcgtatatgcagctgaattccctgacctccgaagattccgcggtgtatttttgcaaaacctccacctttttttttgattattggggccagggcaccaccctgaccgtgtcctccaccacgacgccagcgccgcgaccaccaacaccggcgcccaccatcgcgtcgcagcccctgtccctgcgcccagaggcgtgccggccagcggcggggggcgcagtgcacacgagggggctggacttcgcctgtgatatctacatctgggcgcccttggccgggacttgtggggtccttctcctgtcactggttatcaccaaacggggcagaaagaaactcctgtatatattcaaacaaccatttatgagaccagtacaaactactcaagaggaagatggctgtagctgccgatttccagaagaagaagaaggaggatgtgaactgagagtgaagttcagcaggagcgcagacgcccccgcgtacaagcagggccagaaccagctctataacgagctcaatctaggacgaagagaggagtacgatgttttggacaagaggcgtggccgggaccctgagatggggggaaagccgagaaggaagaaccctcaggaaggcctgtacaatgaactgcagaaagataagatggcggaggcctacagtgagattgggatgaaaggcgagcgccggaggggcaaggggcacgatggcctttaccagggtctcagtacagccaccaaggacacctacgacgcccttcacatgcaggccctgccccctcgctaatctagaggcgcgcccctctccctcccccccccctaacgttactggccgaagccgcttggaataaggccggtgtgcgtttgtctatatgttattttccaccatattgccgtcttttggcaatgtgagggcccggaaacctggccctgtcttcttgacgagcattcctaggggtctttcccctctcgccaaaggaatgcaaggtctgttgaatgtcgtgaaggaagcagttcctctggaagcttcttgaagacaaacaacgtctgtagcgaccctttgcaggcagcggaaccccccacctggcgacaggtgcctctgcggccaaaagccacgtgtataagatacacctgcaaaggcggcacaaccccagtgccacgttgtgagttggatagttgtggaaagagtcaaatggctctcctcaagcgtattcaacaaggggctgaaggatgcccagaaggtaccccattgtatgggatctgatctggggcctcggtacacatgctttacatgtgtttagtcgaggttaaaaaaacgtctaggccccccgaaccacggggacgtggttttcctttgaaaaacacgatgataatatggccacaacccatatgatggccttaccagtgaccgccttgctcctgccgctggccttgctgctccacgccgccaggccggacatccagatgacacagactacatcctccctgtctgcctctctgggagacagagtcaccatcagttgcagggcaagtcaggacattagtaaatatttaaattggtatcagcagaaaccagatggaactgttaaactcctgatctaccatacatcaagattacactcaggagtcccatcaaggttcagtggcagtgggtctggaacagattattctctcaccattagcaacctggagcaagaagatattgccacttacttttgccaacagggtaatacgcttccgtacacgttcggaggggggaccaagctggagatcacaggtggcggtggctcgggcggtggtgggtcgggtggcggcggatctgaggtgaaactgcaggagtcaggacctggcctggtggcgccctcacagagcctgtccgtcacatgcactgtctcaggggtctcattacccgactatggtgtaagctggattcgccagcctccacgaaagggtctggagtggctgggagtaatatggggtagtgaaaccacatactataattcagctctcaaatccagactgaccatcatcaaggacaactccaagagccaagttttcttaaaaatgaacagtctgcaaactgatgacacagccatttactactgtgccaaacattattactacggtggtagctatgctatggactactggggccaaggaacctcagtcaccgtctcctcaaccacgacgccagcgccgcgaccaccaacaccggcgcccaccatcgcgtcgcagcccctgtccctgcgcccagaggcgtgccggccagcggcggggggcgcagtgcacacgagggggctggacttcgcctgtgatatctacatctgggcgcccttggccgggacttgtggggtccttctcctgtcactggttatcaccctttactgcaaacggggcagaaagaaactcctgtatatattcaaacaaccatttatgagaccagtacaaactactcaagaggaagatggctgtagctgccgatttccagaagaagaagaaggaggatgtgaactgagagtgaagttcagcaggagcgcagacgcccccgcgtacaagcagggccagaaccagctctataacgagctcaatctaggacgaagagaggagtacgatgttttggacaagaggcgtggccgggaccctgagatggggggaaagccgagaaggaagaaccctcaggaaggcctgtacaatgaactgcagaaagataagatggcggaggcctacagtgagattgggatgaaaggcgagcgccggaggggcaaggggcacgatggcctttaccagggtctcagtacagccaccaaggacacctacgacgcccttcacatgcaggccctgccccctcgctaa

SEQ ID NO: 205 - protein, 485 aa, Artificial Sequence
  Synthesized
MALPVTALLLPLALLLHAARPDIVMTQSPSSLTVTAGEKVTMICKSSQSLLNSGDQKNYLTWYQQKPGQPPKLLIFWASTRESGVPDRFTGSGSGTDFTLTISSVQAEDLAVYYCQNDYSYPLTFGAGTKLELKGGGGSGGGGSGGGGSQVQLQQSDAELVKPGSSVKISCKASGYTFTDHAIHWVKQKPEQGLEWIGHFSPGNTDIKYNDKFKGKATLTVDRSSSTAYMQLNSLTSEDSAVYFCKTSTFFFDYWGQGTTLTVSSTTTPAPRPPTPAPTIASQPLSLRPEACRPAAGGAVHTRGLDFACDIYIWAPLAGTCGVLLLSLVITKRGRKKLLYIFKQPFMRPVQTTQEEDGCSCRFPEEEEGGCELRVKFSRSADAPAYQQGQNQLYNELNLGRREEYDVLDKRRGRDPEMGGKPRRKNPQEGLYNELQKDKMAEAYSEIGMKGERRRGKGHDGLYQGLSTATKDTYDALHMQALPPR

SEQ ID NO: 206 - DNA, 3524 bp, Artificial Sequence
  Synthesized
atggccttaccagtgaccgccttgctcctgccgctggccttgctgctccacgccgccaggccggatattgtgatgacccagtccccgtcctccctgaccgtgaccgcgggcgaaaaagtgaccatgatttgcaaatcctcccagtccctgctgaattccggcgatcagaaaaattatctgacctggtatcagcagaaaccgggccagccgccgaaactgctgattttttgggcgtccacccgtgaatccggcgtgccggatcgttttaccggctccggctccggcaccgattttaccctgaccatttcctccgtgcaggcggaagatctggcggtgtattattgccagaatgattattcctatccgctgacctttggcgcgggcaccaaactggaactgaaaggcggcggcggctccggcggcggcggctccggcggcggcggctcccaggtgcagctgcagcagtccgatgcggaactggtgaaaccgggctcctccgtgaaaatttcctgcaaagcgtccggctatacctttaccgatcatgcgattcattgggtgaaacagaaaccggaacagggcctggaatggattggccatttttccccgggcaataccgatattaaatataatgataaatttaaaggcaaagcgaccctgaccgtggatcgttcctcctccaccgcgtatatgcagctgaattccctgacctccgaagattccgcggtgtatttttgcaaaacctccacctttttttttgattattggggccagggcaccaccctgaccgtgtcctccaccacgacgccagcgccgcgaccaccaacaccggcgcccaccatcgcgtcgcagcccctgtccctgcgcccagaggcgtgccggccagcggcggggggcgcagtgcacacgagggggctggacttcgcctgtgatatctacatctgggcgcccttggccgggacttgtggggtccttctcctgtcactggttatcaccctttactgcaaacggggcagaaagaaactcctgtatatattcaaacaaccatttatgagaccagtacaaactactcaagaggaagatggctgtagctgccgatttccagaagaagaagaaggaggatgtgaactgagagtgaagttcagcaggagcgcagacgcccccgcgtacaagcagggccagaaccagctctataacgagctcaatctaggacgaagagaggagtacgatgttttggacaagaggcgtggccgggaccctgagatggggggaaagccgagaaggaagaaccctcaggaaggcctgtacaatgaactgcagaaagataagatggcggaggcctacagtgagattgggatgaaaggcgagcgccggaggggcaaggggcacgatggcctttaccagggtctcagtacagccaccaaggacacctacgacgcccttcacatgcaggccctgccccctcgctaatctagaggcgcgcccctctccctcccccccccctaacgttactggccgaagccgcttggaataaggccggtgtgcgtttgtctatatgttattttccaccatattgccgtcttttggcaatgtgagggcccggaaacctggccctgtcttcttgacgagcattcctaggggtctttcccctctcgccaaaggaatgcaaggtctgttgaatgtcgtgaaggaagcagttcctctggaagcttcttgaagacaaacaacgtctgtagcgaccctttgcaggcagcggaaccccccacctggcgacaggtgcctctgcggccaaaagccacgtgtataagatacacctgcaaaggcggcacaaccccagtgccacgttgtgagttggatagttgtggaaagagtcaaatggctctcctcaagcgtattcaacaaggggctgaaggatgcccagaaggtaccccattgtatgggatctgatctggggcctcggtacacatgctttacatgtgtttagtcgaggttaaaaaaacgtctaggccccccgaaccacggggacgtggttttcctttgaaaaacacgatgataatatggccacaacccatatgatggccttaccagtgaccgccttgctcctgccgctggccttgctgctccacgccgccaggccggacatccagatgacacagactacatcctccctgtctgcctctctgggagacagagtcaccatcagttgcagggcaagtcaggacattagtaaatatttaaattggtatcagcagaaaccagatggaactgttaaactcctgatctaccatacatcaagattacactcaggagtcccatcaaggttcagtggcagtgggtctggaacagattattctctcaccattagcaacctggagcaagaagatattgccacttacttttgccaacagggtaatacgcttccgtacacgttcggaggggggaccaagctggagatcacaggtggcggtggctcgggcggtggtgggtcgggtggcggcggatctgaggtgaaactgcaggagtcaggacctggcctggtggcgccctcacagagcctgtccgtcacatgcactgtctcaggggtctcattacccgactatggtgtaagctggattcgccagcctccacgaaagggtctggagtggctgggagtaatatggggtagtgaaaccacatactataattcagctctcaaatccagactgaccatcatcaaggacaactccaagagccaagttttcttaaaaatgaacagtctgcaaactgatgacacagccatttactactgtgccaaacattattactacggtggtagctatgctatggactactggggccaaggaacctcagtcaccgtctcctcaaccacgacgccagcgccgcgaccaccaacaccggcgcccaccatcgcgtcgcagcccctgtccctgcgcccagaggcgtgccggccagcggcggggggcgcagtgcacacgagggggctggacttcgcctgtgatatctacatctgggcgcccttggccgggacttgtggggtccttctcctgtcactggttatcaccaaacggggcagaaagaaactcctgtatatattcaaacaaccatttatgagaccagtacaaactactcaagaggaagatggctgtagctgccgatttccagaagaagaagaaggaggatgtgaactgagagtgaagttcagcaggagcgcagacgcccccgcgtacaagcagggccagaaccagctctataacgagctcaatctaggacgaagagaggagtacgatgttttggacaagaggcgtggccgggaccctgagatggggggaaagccgagaaggaagaaccctcaggaaggcctgtacaatgaactgcagaaagataagatggcggaggcctacagtgagattgggatgaaaggcgagcgccggaggggcaaggggcacgatggcctttaccagggtctcagtacagccaccaaggacacctacgacgcccttcacatgcaggccctgccccctcgctaa

SEQ ID NO: 207 - protein, 483 aa, Artificial Sequence
  Synthesized
MALPVTALLLPLALLLHAARPDIQMTQTTSSLSASLGDRVTISCRASQDISKYLNWYQQKPDGTVKLLIYHTSRLHSGVPSRFSGSGSGTDYSLTISNLEQEDIATYFCQQGNTLPYTFGGGTKLEITGGGGSGGGGSGGGGSEVKLQESGPGLVAPSQSLSVTCTVSGVSLPDYGVSWIRQPPRKGLEWLGVIWGSETTYYNSALKSRLTIIKDNSKSQVFLKMNSLQTDDTAIYYCAKHYYYGGSYAMDYWGQGTSVTVSSTTTPAPRPPTPAPTIASQPLSLRPEACRPAAGGAVHTRGLDFACDIYIWAPLAGTCGVLLLSLVITKRGRKKLLYIFKQPFMRPVQTTQEEDGCSCRFPEEEEGGCELRVKFSRSADAPAYQQGQNQLYNELNLGRREEYDVLDKRRGRDPEMGGKPRRKNPQEGLYNELQKDKMAEAYSEIGMKGERRRGKGHDGLYQGLSTATKDTYDALHMQALPPR

SEQ ID NO: 208 - DNA, 3515 bp, Artificial Sequence
  Synthesized
atggccttaccagtgaccgccttgctcctgccgctggccttgctgctccacgccgccaggccggatattgtgatgacccagtccccgtcctccctgaccgtgaccgcgggcgaaaaagtgaccatgatttgcaaatcctcccagtccctgctgaattccggcgatcagaaaaattatctgacctggtatcagcagaaaccgggccagccgccgaaactgctgattttttgggcgtccacccgtgaatccggcgtgccggatcgttttaccggctccggctccggcaccgattttaccctgaccatttcctccgtgcaggcggaagatctggcggtgtattattgccagaatgattattcctatccgctgacctttggcgcgggcaccaaactggaactgaaaggcggcggcggctccggcggcggcggctccggcggcggcggctcccaggtgcagctgcagcagtccgatgcggaactggtgaaaccgggctcctccgtgaaaatttcctgcaaagcgtccggctatacctttaccgatcatgcgattcattgggtgaaacagaaaccggaacagggcctggaatggattggccatttttccccgggcaataccgatattaaatataatgataaatttaaaggcaaagcgaccctgaccgtggatcgttcctcctccaccgcgtatatgcagctgaattccctgacctccgaagattccgcggtgtatttttgcaaaacctccacctttttttttgattattggggccagggcaccaccctgaccgtgtcctccaccacgacgccagcgccgcgaccaccaacaccggcgcccaccatcgcgtcgcagcccctgtccctgcgcccagaggcgtgccggccagcggcggggggcgcagtgcacacgagggggctggacttcgcctgtgatatctacatctgggcgcccttggccgggacttgtggggtccttctcctgtcactggttatcaccaaacggggcagaaagaaactcctgtatatattcaaacaaccatttatgagaccagtacaaactactcaagaggaagatggctgtagctgccgatttccagaagaagaagaaggaggatgtgaactgagagtgaagttcagcaggagcgcagacgcccccgcgtacaagcagggccagaaccagctctataacgagctcaatctaggacgaagagaggagtacgatgttttggacaagaggcgtggccgggaccctgagatggggggaaagccgagaaggaagaaccctcaggaaggcctgtacaatgaactgcagaaagataagatggcggaggcctacagtgagattgggatgaaaggcgagcgccggaggggcaaggggcacgatggcctttaccagggtctcagtacagccaccaaggacacctacgacgcccttcacatgcaggccctgccccctcgctaatctagaggcgcgcccctctccctcccccccccctaacgttactggccgaagccgcttggaataaggccggtgtgcgtttgtctatatgttattttccaccatattgccgtcttttggcaatgtgagggcccggaaacctggccctgtcttcttgacgagcattcctaggggtctttcccctctcgccaaaggaatgcaaggtctgttgaatgtcgtgaaggaagcagttcctctggaagcttcttgaagacaaacaacgtctgtagcgaccctttgcaggcagcggaaccccccacctggcgacaggtgcctctgcggccaaaagccacgtgtataagatacacctgcaaaggcggcacaaccccagtgccacgttgtgagttggatagttgtggaaagagtcaaatggctctcctcaagcgtattcaacaaggggctgaaggatgcccagaaggtaccccattgtatgggatctgatctggggcctcggtacacatgctttacatgtgtttagtcgaggttaaaaaaacgtctaggccccccgaaccacggggacgtggttttcctttgaaaaacacgatgataatatggccacaacccatatgatggccttaccagtgaccgccttgctcctgccgctggccttgctgctccacgccgccaggccggacatccagatgacacagactacatcctccctgtctgcctctctgggagacagagtcaccatcagttgcagggcaagtcaggacattagtaaatatttaaattggtatcagcagaaaccagatggaactgttaaactcctgatctaccatacatcaagattacactcaggagtcccatcaaggttcagtggcagtgggtctggaacagattattctctcaccattagcaacctggagcaagaagatattgccacttacttttgccaacagggtaatacgcttccgtacacgttcggaggggggaccaagctggagatcacaggtggcggtggctcgggcggtggtgggtcgggtggcggcggatctgaggtgaaactgcaggagtcaggacctggcctggtggcgccctcacagagcctgtccgtcacatgcactgtctcaggggtctcattacccgactatggtgtaagctggattcgccagcctccacgaaagggtctggagtggctgggagtaatatggggtagtgaaaccacatactataattcagctctcaaatccagactgaccatcatcaaggacaactccaagagccaagttttcttaaaaatgaacagtctgcaaactgatgacacagccatttactactgtgccaaacattattactacggtggtagctatgctatggactactggggccaaggaacctcagtcaccgtctcctcaaccacgacgccagcgccgcgaccaccaacaccggcgcccaccatcgcgtcgcagcccctgtccctgcgcccagaggcgtgccggccagcggcggggggcgcagtgcacacgagggggctggacttcgcctgtgatatctacatctgggcgcccttggccgggacttgtggggtccttctcctgtcactggttatcaccaaacggggcagaaagaaactcctgtatatattcaaacaaccatttatgagaccagtacaaactactcaagaggaagatggctgtagctgccgatttccagaagaagaagaaggaggatgtgaactgagagtgaagttcagcaggagcgcagacgcccccgcgtacaagcagggccagaaccagctctataacgagctcaatctaggacgaagagaggagtacgatgttttggacaagaggcgtggccgggaccctgagatggggggaaagccgagaaggaagaaccctcaggaaggcctgtacaatgaactgcagaaagataagatggcggaggcctacagtgagattgggatgaaaggcgagcgccggaggggcaaggggcacgatggcctttaccagggtctcagtacagccaccaaggacacctacgacgcccttcacatgcaggccctgccccctcgctaa

SEQ ID NO: 209 - DNA, 3533 bp, Artificial Sequence
  Synthesized
atggccttaccagtgaccgccttgctcctgccgctggccttgctgctccacgccgccaggccggacatcgtgatgacccagtccccctccagcctgacagtgacagccggcgagaaggtgacaatgatctgtaagtccagccagagcctgctgaacagcggcgaccagaagaactacctgacctggtaccagcagaagcctggccagccccccaagctgctgatcttctgggccagcacaagggagagcggcgtgcccgacagattcacaggcagcggcagcggcaccgacttcacactgaccatttcctccgtgcaggccgaggacctcgccgtgtactactgccagaacgactactcctaccccctgacattcggcgccggcaccaaactggagctgaagggtggcggtggctcgggcggtggtgggtcgggtggcggcggatctcaggtgcagctccagcagtccgatgccgagctggtgaagcccggaagcagcgtcaagatcagctgtaaggcctccggctacaccttcacagaccacgccatccactgggtgaagcagaagcccgagcagggcctggagtggatcggccactttagccccggaaacaccgacatcaagtacaacgacaagttcaagggcaaggccaccctgaccgtggacaggagcagcagcaccgcctacatgcagctgaacagcctgacaagcgaggacagcgccgtgtacttctgcaagacctccaccttcttcttcgactactggggccagggaaccaccctgacagtgtccagcaccacgacgccagcgccgcgaccaccaacaccggcgcccaccatcgcgtcgcagcccctgtccctgcgcccagaggcgtgccggccagcggcggggggcgcagtgcacacgagggggctggacttcgcctgtgatatctacatctgggcgcccttggccgggacttgtggggtccttctcctgtcactggttatcaccctttactgcaaacggggcagaaagaaactcctgtatatattcaaacaaccatttatgagaccagtacaaactactcaagaggaagatggctgtagctgccgatttccagaagaagaagaaggaggatgtgaactgagagtgaagttcagcaggagcgcagacgcccccgcgtacaagcagggccagaaccagctctataacgagctcaatctaggacgaagagaggagtacgatgttttggacaagaggcgtggccgggaccctgagatggggggaaagccgagaaggaagaaccctcaggaaggcctgtacaatgaactgcagaaagataagatggcggaggcctacagtgagattgggatgaaaggcgagcgccggaggggcaaggggcacgatggcctttaccagggtctcagtacagccaccaaggacacctacgacgcccttcacatgcaggccctgccccctcgctaatctagaggcgcgcccctctccctcccccccccctaacgttactggccgaagccgcttggaataaggccggtgtgcgtttgtctatatgttattttccaccatattgccgtcttttggcaatgtgagggcccggaaacctggccctgtcttcttgacgagcattcctaggggtctttcccctctcgccaaaggaatgcaaggtctgttgaatgtcgtgaaggaagcagttcctctggaagcttcttgaagacaaacaacgtctgtagcgaccctttgcaggcagcggaaccccccacctggcgacaggtgcctctgcggccaaaagccacgtgtataagatacacctgcaaaggcggcacaaccccagtgccacgttgtgagttggatagttgtggaaagagtcaaatggctctcctcaagcgtattcaacaaggggctgaaggatgcccagaaggtaccccattgtatgggatctgatctggggcctcggtacacatgctttacatgtgtttagtcgaggttaaaaaaacgtctaggccccccgaaccacggggacgtggttttcctttgaaaaacacgatgataatatggccacaacccatatgatggccttaccagtgaccgccttgctcctgccgctggccttgctgctccacgccgccaggccggacatccagatgacacagactacatcctccctgtctgcctctctgggagacagagtcaccatcagttgcagggcaagtcaggacattagtaaatatttaaattggtatcagcagaaaccagatggaactgttaaactcctgatctaccatacatcaagattacactcaggagtcccatcaaggttcagtggcagtgggtctggaacagattattctctcaccattagcaacctggagcaagaagatattgccacttacttttgccaacagggtaatacgcttccgtacacgttcggaggggggaccaagctggagatcacaggtggcggtggctcgggcggtggtgggtcgggtggcggcggatctgaggtgaaactgcaggagtcaggacctggcctggtggcgccctcacagagcctgtccgtcacatgcactgtctcaggggtctcattacccgactatggtgtaagctggattcgccagcctccacgaaagggtctggagtggctgggagtaatatggggtagtgaaaccacatactataattcagctctcaaatccagactgaccatcatcaaggacaactccaagagccaagttttcttaaaaatgaacagtctgcaaactgatgacacagccatttactactgtgccaaacattattactacggtggtagctatgctatggactactggggccaaggaacctcagtcaccgtctcctcaaccacgacgccagcgccgcgaccaccaacaccggcgcccaccatcgcgtcgcagcccctgtccctgcgcccagaggcgtgccggccagcggcggggggcgcagtgcacacgagggggctggacttcgcctgtgatatctacatctgggcgcccttggccgggacttgtggggtccttctcctgtcactggttatcaccctttactgcaaacggggcagaaagaaactcctgtatatattcaaacaaccatttatgagaccagtacaaactactcaagaggaagatggctgtagctgccgatttccagaagaagaagaaggaggatgtgaactgagagtgaagttcagcaggagcgcagacgcccccgcgtacaagcagggccagaaccagctctataacgagctcaatctaggacgaagagaggagtacgatgttttggacaagaggcgtggccgggaccctgagatggggggaaagccgagaaggaagaaccctcaggaaggcctgtacaatgaactgcagaaagataagatggcggaggcctacagtgagattgggatgaaaggcgagcgccggaggggcaaggggcacgatggcctttaccagggtctcagtacagccaccaaggacacctacgacgcccttcacatgcaggccctgccccctcgctaa

SEQ ID NO: 210 - protein, 490 aa, Artificial Sequence
  Synthesized
MALPVTALLLPLALLLHAARPDIVMTQAAFSNPVTLGTSASISCRSSKSLLHSNGITYFFWYLQKPGLSPQLLIYQMSNLASGVPDRFSSSGSGTDFTLRISRVEAEDVGVYYCAQNLELPPTFGGGTKLEIKRAGGGGSGGGGSGGGGSEVKLVESGGGLVQPGGSMKLSCVASGFTFSNYWMNWVRQSPEKGLEWVAEIRLKSNNYTTHYAESVKGRFTISRDDSKSSVSLQMNNLRVEDTGIYYCTRHYYFDYWGQGTTLTVSSTTTPAPRPPTPAPTIASQPLSLRPEACRPAAGGAVHTRGLDFACDIYIWAPLAGTCGVLLLSLVITLYCKRGRKKLLYIFKQPFMRPVQTTQEEDGCSCRFPEEEEGGCELRVKFSRSADAPAYQQGQNQLYNELNLGRREEYDVLDKRRGRDPEMGGKPRRKNPQEGLYNELQKDKMAEAYSEIGMKGERRRGKGHDGLYQGLSTATKDTYDALHMQALPPR

SEQ ID NO: 211 - DNA, 3524 bp, Artificial Sequence
  Synthesized
atggccttaccagtgaccgccttgctcctgccgctggccttgctgctccacgccgccaggccggacatcgtgatgacccagtccccctccagcctgacagtgacagccggcgagaaggtgacaatgatctgtaagtccagccagagcctgctgaacagcggcgaccagaagaactacctgacctggtaccagcagaagcctggccagccccccaagctgctgatcttctgggccagcacaagggagagcggcgtgcccgacagattcacaggcagcggcagcggcaccgacttcacactgaccatttcctccgtgcaggccgaggacctcgccgtgtactactgccagaacgactactcctaccccctgacattcggcgccggcaccaaactggagctgaagggtggcggtggctcgggcggtggtgggtcgggtggcggcggatctcaggtgcagctccagcagtccgatgccgagctggtgaagcccggaagcagcgtcaagatcagctgtaaggcctccggctacaccttcacagaccacgccatccactgggtgaagcagaagcccgagcagggcctggagtggatcggccactttagccccggaaacaccgacatcaagtacaacgacaagttcaagggcaaggccaccctgaccgtggacaggagcagcagcaccgcctacatgcagctgaacagcctgacaagcgaggacagcgccgtgtacttctgcaagacctccaccttcttcttcgactactggggccagggaaccaccctgacagtgtccagcaccacgacgccagcgccgcgaccaccaacaccggcgcccaccatcgcgtcgcagcccctgtccctgcgcccagaggcgtgccggccagcggcggggggcgcagtgcacacgagggggctggacttcgcctgtgatatctacatctgggcgcccttggccgggacttgtggggtccttctcctgtcactggttatcaccaaacggggcagaaagaaactcctgtatatattcaaacaaccatttatgagaccagtacaaactactcaagaggaagatggctgtagctgccgatttccagaagaagaagaaggaggatgtgaactgagagtgaagttcagcaggagcgcagacgcccccgcgtacaagcagggccagaaccagctctataacgagctcaatctaggacgaagagaggagtacgatgttttggacaagaggcgtggccgggaccctgagatggggggaaagccgagaaggaagaaccctcaggaaggcctgtacaatgaactgcagaaagataagatggcggaggcctacagtgagattgggatgaaaggcgagcgccggaggggcaaggggcacgatggcctttaccagggtctcagtacagccaccaaggacacctacgacgcccttcacatgcaggccctgccccctcgctaatctagaggcgcgcccctctccctcccccccccctaacgttactggccgaagccgcttggaataaggccggtgtgcgtttgtctatatgttattttccaccatattgccgtcttttggcaatgtgagggcccggaaacctggccctgtcttcttgacgagcattcctaggggtctttcccctctcgccaaaggaatgcaaggtctgttgaatgtcgtgaaggaagcagttcctctggaagcttcttgaagacaaacaacgtctgtagcgaccctttgcaggcagcggaaccccccacctggcgacaggtgcctctgcggccaaaagccacgtgtataagatacacctgcaaaggcggcacaaccccagtgccacgttgtgagttggatagttgtggaaagagtcaaatggctctcctcaagcgtattcaacaaggggctgaaggatgcccagaaggtaccccattgtatgggatctgatctggggcctcggtacacatgctttacatgtgtttagtcgaggttaaaaaaacgtctaggccccccgaaccacggggacgtggttttcctttgaaaaacacgatgataatatggccacaacccatatgatggccttaccagtgaccgccttgctcctgccgctggccttgctgctccacgccgccaggccggacatccagatgacacagactacatcctccctgtctgcctctctgggagacagagtcaccatcagttgcagggcaagtcaggacattagtaaatatttaaattggtatcagcagaaaccagatggaactgttaaactcctgatctaccatacatcaagattacactcaggagtcccatcaaggttcagtggcagtgggtctggaacagattattctctcaccattagcaacctggagcaagaagatattgccacttacttttgccaacagggtaatacgcttccgtacacgttcggaggggggaccaagctggagatcacaggtggcggtggctcgggcggtggtgggtcgggtggcggcggatctgaggtgaaactgcaggagtcaggacctggcctggtggcgccctcacagagcctgtccgtcacatgcactgtctcaggggtctcattacccgactatggtgtaagctggattcgccagcctccacgaaagggtctggagtggctgggagtaatatggggtagtgaaaccacatactataattcagctctcaaatccagactgaccatcatcaaggacaactccaagagccaagttttcttaaaaatgaacagtctgcaaactgatgacacagccatttactactgtgccaaacattattactacggtggtagctatgctatggactactggggccaaggaacctcagtcaccgtctcctcaaccacgacgccagcgccgcgaccaccaacaccggcgcccaccatcgcgtcgcagcccctgtccctgcgcccagaggcgtgccggccagcggcggggggcgcagtgcacacgagggggctggacttcgcctgtgatatctacatctgggcgcccttggccgggacttgtggggtccttctcctgtcactggttatcaccctttactgcaaacggggcagaaagaaactcctgtatatattcaaacaaccatttatgagaccagtacaaactactcaagaggaagatggctgtagctgccgatttccagaagaagaagaaggaggatgtgaactgagagtgaagttcagcaggagcgcagacgcccccgcgtacaagcagggccagaaccagctctataacgagctcaatctaggacgaagagaggagtacgatgttttggacaagaggcgtggccgggaccctgagatggggggaaagccgagaaggaagaaccctcaggaaggcctgtacaatgaactgcagaaagataagatggcggaggcctacagtgagattgggatgaaaggcgagcgccggaggggcaaggggcacgatggcctttaccagggtctcagtacagccaccaaggacacctacgacgcccttcacatgcaggccctgccccctcgctaa

SEQ ID NO: 212 - protein, 487 aa, Artificial Sequence
  Synthesized
MALPVTALLLPLALLLHAARPDIVMTQAAFSNPVTLGTSASISCRSSKSLLHSNGITYFFWYLQKPGLSPQLLIYQMSNLASGVPDRFSSSGSGTDFTLRISRVEAEDVGVYYCAQNLELPPTFGGGTKLEIKRAGGGGSGGGGSGGGGSEVKLVESGGGLVQPGGSMKLSCVASGFTFSNYWMNWVRQSPEKGLEWVAEIRLKSNNYTTHYAESVKGRFTISRDDSKSSVSLQMNNLRVEDTGIYYCTRHYYFDYWGQGTTLTVSSTTTPAPRPPTPAPTIASQPLSLRPEACRPAAGGAVHTRGLDFACDIYIWAPLAGTCGVLLLSLVITKRGRKKLLYIFKQPFMRPVQTTQEEDGCSCRFPEEEEGGCELRVKFSRSADAPAYQQGQNQLYNELNLGRREEYDVLDKRRGRDPEMGGKPRRKNPQEGLYNELQKDKMAEAYSEIGMKGERRRGKGHDGLYQGLSTATKDTYDALHMQALPPR

SEQ ID NO: 213 - DNA, 3524 bp, Artificial Sequence
  Synthesized
atggccttaccagtgaccgccttgctcctgccgctggccttgctgctccacgccgccaggccggacatcgtgatgacccagtccccctccagcctgacagtgacagccggcgagaaggtgacaatgatctgtaagtccagccagagcctgctgaacagcggcgaccagaagaactacctgacctggtaccagcagaagcctggccagccccccaagctgctgatcttctgggccagcacaagggagagcggcgtgcccgacagattcacaggcagcggcagcggcaccgacttcacactgaccatttcctccgtgcaggccgaggacctcgccgtgtactactgccagaacgactactcctaccccctgacattcggcgccggcaccaaactggagctgaagggtggcggtggctcgggcggtggtgggtcgggtggcggcggatctcaggtgcagctccagcagtccgatgccgagctggtgaagcccggaagcagcgtcaagatcagctgtaaggcctccggctacaccttcacagaccacgccatccactgggtgaagcagaagcccgagcagggcctggagtggatcggccactttagccccggaaacaccgacatcaagtacaacgacaagttcaagggcaaggccaccctgaccgtggacaggagcagcagcaccgcctacatgcagctgaacagcctgacaagcgaggacagcgccgtgtacttctgcaagacctccaccttcttcttcgactactggggccagggaaccaccctgacagtgtccagcaccacgacgccagcgccgcgaccaccaacaccggcgcccaccatcgcgtcgcagcccctgtccctgcgcccagaggcgtgccggccagcggcggggggcgcagtgcacacgagggggctggacttcgcctgtgatatctacatctgggcgcccttggccgggacttgtggggtccttctcctgtcactggttatcaccctttactgcaaacggggcagaaagaaactcctgtatatattcaaacaaccatttatgagaccagtacaaactactcaagaggaagatggctgtagctgccgatttccagaagaagaagaaggaggatgtgaactgagagtgaagttcagcaggagcgcagacgcccccgcgtacaagcagggccagaaccagctctataacgagctcaatctaggacgaagagaggagtacgatgttttggacaagaggcgtggccgggaccctgagatggggggaaagccgagaaggaagaaccctcaggaaggcctgtacaatgaactgcagaaagataagatggcggaggcctacagtgagattgggatgaaaggcgagcgccggaggggcaaggggcacgatggcctttaccagggtctcagtacagccaccaaggacacctacgacgcccttcacatgcaggccctgccccctcgctaatctagaggcgcgcccctctccctcccccccccctaacgttactggccgaagccgcttggaataaggccggtgtgcgtttgtctatatgttattttccaccatattgccgtcttttggcaatgtgagggcccggaaacctggccctgtcttcttgacgagcattcctaggggtctttcccctctcgccaaaggaatgcaaggtctgttgaatgtcgtgaaggaagcagttcctctggaagcttcttgaagacaaacaacgtctgtagcgaccctttgcaggcagcggaaccccccacctggcgacaggtgcctctgcggccaaaagccacgtgtataagatacacctgcaaaggcggcacaaccccagtgccacgttgtgagttggatagttgtggaaagagtcaaatggctctcctcaagcgtattcaacaaggggctgaaggatgcccagaaggtaccccattgtatgggatctgatctggggcctcggtacacatgctttacatgtgtttagtcgaggttaaaaaaacgtctaggccccccgaaccacggggacgtggttttcctttgaaaaacacgatgataatatggccacaacccatatgatggccttaccagtgaccgccttgctcctgccgctggccttgctgctccacgccgccaggccggacatccagatgacacagactacatcctccctgtctgcctctctgggagacagagtcaccatcagttgcagggcaagtcaggacattagtaaatatttaaattggtatcagcagaaaccagatggaactgttaaactcctgatctaccatacatcaagattacactcaggagtcccatcaaggttcagtggcagtgggtctggaacagattattctctcaccattagcaacctggagcaagaagatattgccacttacttttgccaacagggtaatacgcttccgtacacgttcggaggggggaccaagctggagatcacaggtggcggtggctcgggcggtggtgggtcgggtggcggcggatctgaggtgaaactgcaggagtcaggacctggcctggtggcgccctcacagagcctgtccgtcacatgcactgtctcaggggtctcattacccgactatggtgtaagctggattcgccagcctccacgaaagggtctggagtggctgggagtaatatggggtagtgaaaccacatactataattcagctctcaaatccagactgaccatcatcaaggacaactccaagagccaagttttcttaaaaatgaacagtctgcaaactgatgacacagccatttactactgtgccaaacattattactacggtggtagctatgctatggactactggggccaaggaacctcagtcaccgtctcctcaaccacgacgccagcgccgcgaccaccaacaccggcgcccaccatcgcgtcgcagcccctgtccctgcgcccagaggcgtgccggccagcggcggggggcgcagtgcacacgagggggctggacttcgcctgtgatatctacatctgggcgcccttggccgggacttgtggggtccttctcctgtcactggttatcaccaaacggggcagaaagaaactcctgtatatattcaaacaaccatttatgagaccagtacaaactactcaagaggaagatggctgtagctgccgatttccagaagaagaagaaggaggatgtgaactgagagtgaagttcagcaggagcgcagacgcccccgcgtacaagcagggccagaaccagctctataacgagctcaatctaggacgaagagaggagtacgatgttttggacaagaggcgtggccgggaccctgagatggggggaaagccgagaaggaagaaccctcaggaaggcctgtacaatgaactgcagaaagataagatggcggaggcctacagtgagattgggatgaaaggcgagcgccggaggggcaaggggcacgatggcctttaccagggtctcagtacagccaccaaggacacctacgacgcccttcacatgcaggccctgccccctcgctaa

SEQ ID NO: 214 - DNA, 3515 bp, Artificial Sequence
  Synthesized
atggccttaccagtgaccgccttgctcctgccgctggccttgctgctccacgccgccaggccggacatcgtgatgacccagtccccctccagcctgacagtgacagccggcgagaaggtgacaatgatctgtaagtccagccagagcctgctgaacagcggcgaccagaagaactacctgacctggtaccagcagaagcctggccagccccccaagctgctgatcttctgggccagcacaagggagagcggcgtgcccgacagattcacaggcagcggcagcggcaccgacttcacactgaccatttcctccgtgcaggccgaggacctcgccgtgtactactgccagaacgactactcctaccccctgacattcggcgccggcaccaaactggagctgaagggtggcggtggctcgggcggtggtgggtcgggtggcggcggatctcaggtgcagctccagcagtccgatgccgagctggtgaagcccggaagcagcgtcaagatcagctgtaaggcctccggctacaccttcacagaccacgccatccactgggtgaagcagaagcccgagcagggcctggagtggatcggccactttagccccggaaacaccgacatcaagtacaacgacaagttcaagggcaaggccaccctgaccgtggacaggagcagcagcaccgcctacatgcagctgaacagcctgacaagcgaggacagcgccgtgtacttctgcaagacctccaccttcttcttcgactactggggccagggaaccaccctgacagtgtccagcaccacgacgccagcgccgcgaccaccaacaccggcgcccaccatcgcgtcgcagcccctgtccctgcgcccagaggcgtgccggccagcggcggggggcgcagtgcacacgagggggctggacttcgcctgtgatatctacatctgggcgcccttggccgggacttgtggggtccttctcctgtcactggttatcaccaaacggggcagaaagaaactcctgtatatattcaaacaaccatttatgagaccagtacaaactactcaagaggaagatggctgtagctgccgatttccagaagaagaagaaggaggatgtgaactgagagtgaagttcagcaggagcgcagacgcccccgcgtacaagcagggccagaaccagctctataacgagctcaatctaggacgaagagaggagtacgatgttttggacaagaggcgtggccgggaccctgagatggggggaaagccgagaaggaagaaccctcaggaaggcctgtacaatgaactgcagaaagataagatggcggaggcctacagtgagattgggatgaaaggcgagcgccggaggggcaaggggcacgatggcctttaccagggtctcagtacagccaccaaggacacctacgacgcccttcacatgcaggccctgccccctcgctaatctagaggcgcgcccctctccctcccccccccctaacgttactggccgaagccgcttggaataaggccggtgtgcgtttgtctatatgttattttccaccatattgccgtcttttggcaatgtgagggcccggaaacctggccctgtcttcttgacgagcattcctaggggtctttcccctctcgccaaaggaatgcaaggtctgttgaatgtcgtgaaggaagcagttcctctggaagcttcttgaagacaaacaacgtctgtagcgaccctttgcaggcagcggaaccccccacctggcgacaggtgcctctgcggccaaaagccacgtgtataagatacacctgcaaaggcggcacaaccccagtgccacgttgtgagttggatagttgtggaaagagtcaaatggctctcctcaagcgtattcaacaaggggctgaaggatgcccagaaggtaccccattgtatgggatctgatctggggcctcggtacacatgctttacatgtgtttagtcgaggttaaaaaaacgtctaggccccccgaaccacggggacgtggttttcctttgaaaaacacgatgataatatggccacaacccatatgatggccttaccagtgaccgccttgctcctgccgctggccttgctgctccacgccgccaggccggacatccagatgacacagactacatcctccctgtctgcctctctgggagacagagtcaccatcagttgcagggcaagtcaggacattagtaaatatttaaattggtatcagcagaaaccagatggaactgttaaactcctgatctaccatacatcaagattacactcaggagtcccatcaaggttcagtggcagtgggtctggaacagattattctctcaccattagcaacctggagcaagaagatattgccacttacttttgccaacagggtaatacgcttccgtacacgttcggaggggggaccaagctggagatcacaggtggcggtggctcgggcggtggtgggtcgggtggcggcggatctgaggtgaaactgcaggagtcaggacctggcctggtggcgccctcacagagcctgtccgtcacatgcactgtctcaggggtctcattacccgactatggtgtaagctggattcgccagcctccacgaaagggtctggagtggctgggagtaatatggggtagtgaaaccacatactataattcagctctcaaatccagactgaccatcatcaaggacaactccaagagccaagttttcttaaaaatgaacagtctgcaaactgatgacacagccatttactactgtgccaaacattattactacggtggtagctatgctatggactactggggccaaggaacctcagtcaccgtctcctcaaccacgacgccagcgccgcgaccaccaacaccggcgcccaccatcgcgtcgcagcccctgtccctgcgcccagaggcgtgccggccagcggcggggggcgcagtgcacacgagggggctggacttcgcctgtgatatctacatctgggcgcccttggccgggacttgtggggtccttctcctgtcactggttatcaccaaacggggcagaaagaaactcctgtatatattcaaacaaccatttatgagaccagtacaaactactcaagaggaagatggctgtagctgccgatttccagaagaagaagaaggaggatgtgaactgagagtgaagttcagcaggagcgcagacgcccccgcgtacaagcagggccagaaccagctctataacgagctcaatctaggacgaagagaggagtacgatgttttggacaagaggcgtggccgggaccctgagatggggggaaagccgagaaggaagaaccctcaggaaggcctgtacaatgaactgcagaaagataagatggcggaggcctacagtgagattgggatgaaaggcgagcgccggaggggcaaggggcacgatggcctttaccagggtctcagtacagccaccaaggacacctacgacgcccttcacatgcaggccctgccccctcgctaa

SEQ ID NO: 215 - DNA, 3533 bp, Artificial Sequence
  Synthesized
atggccttaccagtgaccgccttgctcctgccgctggccttgctgctccacgccgccaggccggatattgtgatgacccagtccccgtcctccctgaccgtgaccgcgggcgaaaaagtgaccatgatttgcaaatcctcccagtccctgctgaattccggcgatcagaaaaattatctgacctggtatcagcagaaaccgggccagccgccgaaactgctgattttttgggcgtccacccgtgaatccggcgtgccggatcgttttaccggctccggctccggcaccgattttaccctgaccatttcctccgtgcaggcggaagatctggcggtgtattattgccagaatgattattcctatccgctgacctttggcgcgggcaccaaactggaactgaaaggcggcggcggctccggcggcggcggctccggcggcggcggctcccaggtgcagctgcagcagtccgatgcggaactggtgaaaccgggctcctccgtgaaaatttcctgcaaagcgtccggctatacctttaccgatcatgcgattcattgggtgaaacagaaaccggaacagggcctggaatggattggccatttttccccgggcaataccgatattaaatataatgataaatttaaaggcaaagcgaccctgaccgtggatcgttcctcctccaccgcgtatatgcagctgaattccctgacctccgaagattccgcggtgtatttttgcaaaacctccacctttttttttgattattggggccagggcaccaccctgaccgtgtcctccaccacgacgccagcgccgcgaccaccaacaccggcgcccaccatcgcgtcgcagcccctgtccctgcgcccagaggcgtgccggccagcggcggggggcgcagtgcacacgagggggctggacttcgcctgtgatatctacatctgggcgcccttggccgggacttgtggggtccttctcctgtcactggttatcaccctttactgcaaacggggcagaaagaaactcctgtatatattcaaacaaccatttatgagaccagtacaaactactcaagaggaagatggctgtagctgccgatttccagaagaagaagaaggaggatgtgaactgagagtgaagttcagcaggagcgcagacgcccccgcgtacaagcagggccagaaccagctctataacgagctcaatctaggacgaagagaggagtacgatgttttggacaagaggcgtggccgggaccctgagatggggggaaagccgagaaggaagaaccctcaggaaggcctgtacaatgaactgcagaaagataagatggcggaggcctacagtgagattgggatgaaaggcgagcgccggaggggcaaggggcacgatggcctttaccagggtctcagtacagccaccaaggacacctacgacgcccttcacatgcaggccctgccccctcgctaatctagaggcgcgcccctctccctcccccccccctaacgttactggccgaagccgcttggaataaggccggtgtgcgtttgtctatatgttattttccaccatattgccgtcttttggcaatgtgagggcccggaaacctggccctgtcttcttgacgagcattcctaggggtctttcccctctcgccaaaggaatgcaaggtctgttgaatgtcgtgaaggaagcagttcctctggaagcttcttgaagacaaacaacgtctgtagcgaccctttgcaggcagcggaaccccccacctggcgacaggtgcctctgcggccaaaagccacgtgtataagatacacctgcaaaggcggcacaaccccagtgccacgttgtgagttggatagttgtggaaagagtcaaatggctctcctcaagcgtattcaacaaggggctgaaggatgcccagaaggtaccccattgtatgggatctgatctggggcctcggtacacatgctttacatgtgtttagtcgaggttaaaaaaacgtctaggccccccgaaccacggggacgtggttttcctttgaaaaacacgatgataatatggccacaacccatatgatggccttaccagtgaccgccttgctcctgccgctggccttgctgctccacgccgccaggccggatatccagatgacccagagcccgagcagcctgagcgcgagcgtgggtgatcgcgtgaccattacctgcagggcaagtcaggacattagtaaatatttaaattggtatcagcagaaaccgggtaaagcgccgaaactgttaatttatcatacatcaagattacactcaggcgtgccgtcgcgttttagcggctcgggttcgggcaccgattttaccctgaccatctcgagcttgcagccggaggacttcgccacctactattgccaacagggtaatacgcttccgtacacgttcggtcagggcaccaaagtggagatcaaaggtggcggtggctcgggcggtggtgggtcgggtggcggcggatctgaggtgcagctggtggagtctgggggaggcttggtacagcctggggggtccctgagactctcctgtgcagcctctggagtgtccctgcctgattatggcgtgtcctgggtccgccaggctccagggaaggggctggagtgggtttcagtgatctggggcagcgagacaacctactacaacagcgccctgaagtcccgattcaccatctccagagacaatgccaagaactcactgtatctgcaaatgaacagcctgagagccgaggacacggctgtgtattactgtgcgaagcactactactacggcggcagctacgctatggactactggggccaaggaaccctggtcaccgtgtcctcaaccacgacgccagcgccgcgaccaccaacaccggcgcccaccatcgcgtcgcagcccctgtccctgcgcccagaggcgtgccggccagcggcggggggcgcagtgcacacgagggggctggacttcgcctgtgatatctacatctgggcgcccttggccgggacttgtggggtccttctcctgtcactggttatcaccctttactgcaaacggggcagaaagaaactcctgtatatattcaaacaaccatttatgagaccagtacaaactactcaagaggaagatggctgtagctgccgatttccagaagaagaagaaggaggatgtgaactgagagtgaagttcagcaggagcgcagacgcccccgcgtacaagcagggccagaaccagctctataacgagctcaatctaggacgaagagaggagtacgatgttttggacaagaggcgtggccgggaccctgagatggggggaaagccgagaaggaagaaccctcaggaaggcctgtacaatgaactgcagaaagataagatggcggaggcctacagtgagattgggatgaaaggcgagcgccggaggggcaaggggcacgatggcctttaccagggtctcagtacagccaccaaggacacctacgacgcccttcacatgcaggccctgccccctcgctaa

SEQ ID NO: 216 - protein, 486 aa, Artificial Sequence
  Synthesized
MALPVTALLLPLALLLHAARPDIQMTQSPSSLSASVGDRVTITCRASQDISKYLNWYQQKPGKAPKLLIYHTSRLHSGVPSRFSGSGSGTDFTLTISSLQPEDFATYYCQQGNTLPYTFGQGTKVEIKGGGGSGGGGSGGGGSEVQLVESGGGLVQPGGSLRLSCAASGVSLPDYGVSWVRQAPGKGLEWVSVIWGSETTYYNSALKSRFTISRDNAKNSLYLQMNSLRAEDTAVYYCAKHYYYGGSYAMDYWGQGTLVTVSSTTTPAPRPPTPAPTIASQPLSLRPEACRPAAGGAVHTRGLDFACDIYIWAPLAGTCGVLLLSLVITLYCKRGRKKLLYIFKQPFMRPVQTTQEEDGCSCRFPEEEEGGCELRVKFSRSADAPAYQQGQNQLYNELNLGRREEYDVLDKRRGRDPEMGGKPRRKNPQEGLYNELQKDKMAEAYSEIGMKGERRRGKGHDGLYQGLSTATKDTYDALHMQALPPR

SEQ ID NO: 217 - DNA, 3524 bp, Artificial Sequence
  Synthesized
atggccttaccagtgaccgccttgctcctgccgctggccttgctgctccacgccgccaggccggatattgtgatgacccagtccccgtcctccctgaccgtgaccgcgggcgaaaaagtgaccatgatttgcaaatcctcccagtccctgctgaattccggcgatcagaaaaattatctgacctggtatcagcagaaaccgggccagccgccgaaactgctgattttttgggcgtccacccgtgaatccggcgtgccggatcgttttaccggctccggctccggcaccgattttaccctgaccatttcctccgtgcaggcggaagatctggcggtgtattattgccagaatgattattcctatccgctgacctttggcgcgggcaccaaactggaactgaaaggcggcggcggctccggcggcggcggctccggcggcggcggctcccaggtgcagctgcagcagtccgatgcggaactggtgaaaccgggctcctccgtgaaaatttcctgcaaagcgtccggctatacctttaccgatcatgcgattcattgggtgaaacagaaaccggaacagggcctggaatggattggccatttttccccgggcaataccgatattaaatataatgataaatttaaaggcaaagcgaccctgaccgtggatcgttcctcctccaccgcgtatatgcagctgaattccctgacctccgaagattccgcggtgtatttttgcaaaacctccacctttttttttgattattggggccagggcaccaccctgaccgtgtcctccaccacgacgccagcgccgcgaccaccaacaccggcgcccaccatcgcgtcgcagcccctgtccctgcgcccagaggcgtgccggccagcggcggggggcgcagtgcacacgagggggctggacttcgcctgtgatatctacatctgggcgcccttggccgggacttgtggggtccttctcctgtcactggttatcaccaaacggggcagaaagaaactcctgtatatattcaaacaaccatttatgagaccagtacaaactactcaagaggaagatggctgtagctgccgatttccagaagaagaagaaggaggatgtgaactgagagtgaagttcagcaggagcgcagacgcccccgcgtacaagcagggccagaaccagctctataacgagctcaatctaggacgaagagaggagtacgatgttttggacaagaggcgtggccgggaccctgagatggggggaaagccgagaaggaagaaccctcaggaaggcctgtacaatgaactgcagaaagataagatggcggaggcctacagtgagattgggatgaaaggcgagcgccggaggggcaaggggcacgatggcctttaccagggtctcagtacagccaccaaggacacctacgacgcccttcacatgcaggccctgccccctcgctaatctagaggcgcgcccctctccctcccccccccctaacgttactggccgaagccgcttggaataaggccggtgtgcgtttgtctatatgttattttccaccatattgccgtcttttggcaatgtgagggcccggaaacctggccctgtcttcttgacgagcattcctaggggtctttcccctctcgccaaaggaatgcaaggtctgttgaatgtcgtgaaggaagcagttcctctggaagcttcttgaagacaaacaacgtctgtagcgaccctttgcaggcagcggaaccccccacctggcgacaggtgcctctgcggccaaaagccacgtgtataagatacacctgcaaaggcggcacaaccccagtgccacgttgtgagttggatagttgtggaaagagtcaaatggctctcctcaagcgtattcaacaaggggctgaaggatgcccagaaggtaccccattgtatgggatctgatctggggcctcggtacacatgctttacatgtgtttagtcgaggttaaaaaaacgtctaggccccccgaaccacggggacgtggttttcctttgaaaaacacgatgataatatggccacaacccatatgatggccttaccagtgaccgccttgctcctgccgctggccttgctgctccacgccgccaggccggatatccagatgacccagagcccgagcagcctgagcgcgagcgtgggtgatcgcgtgaccattacctgcagggcaagtcaggacattagtaaatatttaaattggtatcagcagaaaccgggtaaagcgccgaaactgttaatttatcatacatcaagattacactcaggcgtgccgtcgcgttttagcggctcgggttcgggcaccgattttaccctgaccatctcgagcttgcagccggaggacttcgccacctactattgccaacagggtaatacgcttccgtacacgttcggtcagggcaccaaagtggagatcaaaggtggcggtggctcgggcggtggtgggtcgggtggcggcggatctgaggtgcagctggtggagtctgggggaggcttggtacagcctggggggtccctgagactctcctgtgcagcctctggagtgtccctgcctgattatggcgtgtcctgggtccgccaggctccagggaaggggctggagtgggtttcagtgatctggggcagcgagacaacctactacaacagcgccctgaagtcccgattcaccatctccagagacaatgccaagaactcactgtatctgcaaatgaacagcctgagagccgaggacacggctgtgtattactgtgcgaagcactactactacggcggcagctacgctatggactactggggccaaggaaccctggtcaccgtgtcctcaaccacgacgccagcgccgcgaccaccaacaccggcgcccaccatcgcgtcgcagcccctgtccctgcgcccagaggcgtgccggccagcggcggggggcgcagtgcacacgagggggctggacttcgcctgtgatatctacatctgggcgcccttggccgggacttgtggggtccttctcctgtcactggttatcaccctttactgcaaacggggcagaaagaaactcctgtatatattcaaacaaccatttatgagaccagtacaaactactcaagaggaagatggctgtagctgccgatttccagaagaagaagaaggaggatgtgaactgagagtgaagttcagcaggagcgcagacgcccccgcgtacaagcagggccagaaccagctctataacgagctcaatctaggacgaagagaggagtacgatgttttggacaagaggcgtggccgggaccctgagatggggggaaagccgagaaggaagaaccctcaggaaggcctgtacaatgaactgcagaaagataagatggcggaggcctacagtgagattgggatgaaaggcgagcgccggaggggcaaggggcacgatggcctttaccagggtctcagtacagccaccaaggacacctacgacgcccttcacatgcaggccctgccccctcgctaa

SEQ ID NO: 218 - DNA, 3524 bp, Artificial Sequence
  Synthesized
atggccttaccagtgaccgccttgctcctgccgctggccttgctgctccacgccgccaggccggatattgtgatgacccagtccccgtcctccctgaccgtgaccgcgggcgaaaaagtgaccatgatttgcaaatcctcccagtccctgctgaattccggcgatcagaaaaattatctgacctggtatcagcagaaaccgggccagccgccgaaactgctgattttttgggcgtccacccgtgaatccggcgtgccggatcgttttaccggctccggctccggcaccgattttaccctgaccatttcctccgtgcaggcggaagatctggcggtgtattattgccagaatgattattcctatccgctgacctttggcgcgggcaccaaactggaactgaaaggcggcggcggctccggcggcggcggctccggcggcggcggctcccaggtgcagctgcagcagtccgatgcggaactggtgaaaccgggctcctccgtgaaaatttcctgcaaagcgtccggctatacctttaccgatcatgcgattcattgggtgaaacagaaaccggaacagggcctggaatggattggccatttttccccgggcaataccgatattaaatataatgataaatttaaaggcaaagcgaccctgaccgtggatcgttcctcctccaccgcgtatatgcagctgaattccctgacctccgaagattccgcggtgtatttttgcaaaacctccacctttttttttgattattggggccagggcaccaccctgaccgtgtcctccaccacgacgccagcgccgcgaccaccaacaccggcgcccaccatcgcgtcgcagcccctgtccctgcgcccagaggcgtgccggccagcggcggggggcgcagtgcacacgagggggctggacttcgcctgtgatatctacatctgggcgcccttggccgggacttgtggggtccttctcctgtcactggttatcaccctttactgcaaacggggcagaaagaaactcctgtatatattcaaacaaccatttatgagaccagtacaaactactcaagaggaagatggctgtagctgccgatttccagaagaagaagaaggaggatgtgaactgagagtgaagttcagcaggagcgcagacgcccccgcgtacaagcagggccagaaccagctctataacgagctcaatctaggacgaagagaggagtacgatgttttggacaagaggcgtggccgggaccctgagatggggggaaagccgagaaggaagaaccctcaggaaggcctgtacaatgaactgcagaaagataagatggcggaggcctacagtgagattgggatgaaaggcgagcgccggaggggcaaggggcacgatggcctttaccagggtctcagtacagccaccaaggacacctacgacgcccttcacatgcaggccctgccccctcgctaatctagaggcgcgcccctctccctcccccccccctaacgttactggccgaagccgcttggaataaggccggtgtgcgtttgtctatatgttattttccaccatattgccgtcttttggcaatgtgagggcccggaaacctggccctgtcttcttgacgagcattcctaggggtctttcccctctcgccaaaggaatgcaaggtctgttgaatgtcgtgaaggaagcagttcctctggaagcttcttgaagacaaacaacgtctgtagcgaccctttgcaggcagcggaaccccccacctggcgacaggtgcctctgcggccaaaagccacgtgtataagatacacctgcaaaggcggcacaaccccagtgccacgttgtgagttggatagttgtggaaagagtcaaatggctctcctcaagcgtattcaacaaggggctgaaggatgcccagaaggtaccccattgtatgggatctgatctggggcctcggtacacatgctttacatgtgtttagtcgaggttaaaaaaacgtctaggccccccgaaccacggggacgtggttttcctttgaaaaacacgatgataatatggccacaacccatatgatggccttaccagtgaccgccttgctcctgccgctggccttgctgctccacgccgccaggccggatatccagatgacccagagcccgagcagcctgagcgcgagcgtgggtgatcgcgtgaccattacctgcagggcaagtcaggacattagtaaatatttaaattggtatcagcagaaaccgggtaaagcgccgaaactgttaatttatcatacatcaagattacactcaggcgtgccgtcgcgttttagcggctcgggttcgggcaccgattttaccctgaccatctcgagcttgcagccggaggacttcgccacctactattgccaacagggtaatacgcttccgtacacgttcggtcagggcaccaaagtggagatcaaaggtggcggtggctcgggcggtggtgggtcgggtggcggcggatctgaggtgcagctggtggagtctgggggaggcttggtacagcctggggggtccctgagactctcctgtgcagcctctggagtgtccctgcctgattatggcgtgtcctgggtccgccaggctccagggaaggggctggagtgggtttcagtgatctggggcagcgagacaacctactacaacagcgccctgaagtcccgattcaccatctccagagacaatgccaagaactcactgtatctgcaaatgaacagcctgagagccgaggacacggctgtgtattactgtgcgaagcactactactacggcggcagctacgctatggactactggggccaaggaaccctggtcaccgtgtcctcaaccacgacgccagcgccgcgaccaccaacaccggcgcccaccatcgcgtcgcagcccctgtccctgcgcccagaggcgtgccggccagcggcggggggcgcagtgcacacgagggggctggacttcgcctgtgatatctacatctgggcgcccttggccgggacttgtggggtccttctcctgtcactggttatcaccaaacggggcagaaagaaactcctgtatatattcaaacaaccatttatgagaccagtacaaactactcaagaggaagatggctgtagctgccgatttccagaagaagaagaaggaggatgtgaactgagagtgaagttcagcaggagcgcagacgcccccgcgtacaagcagggccagaaccagctctataacgagctcaatctaggacgaagagaggagtacgatgttttggacaagaggcgtggccgggaccctgagatggggggaaagccgagaaggaagaaccctcaggaaggcctgtacaatgaactgcagaaagataagatggcggaggcctacagtgagattgggatgaaaggcgagcgccggaggggcaaggggcacgatggcctttaccagggtctcagtacagccaccaaggacacctacgacgcccttcacatgcaggccctgccccctcgctaa

SEQ ID NO: 219 - protein, 483 aa, Artificial Sequence
  Synthesized
MALPVTALLLPLALLLHAARPDIQMTQSPSSLSASVGDRVTITCRASQDISKYLNWYQQKPGKAPKLLIYHTSRLHSGVPSRFSGSGSGTDFTLTISSLQPEDFATYYCQQGNTLPYTFGQGTKVEIKGGGGSGGGGSGGGGSEVQLVESGGGLVQPGGSLRLSCAASGVSLPDYGVSWVRQAPGKGLEWVSVIWGSETTYYNSALKSRFTISRDNAKNSLYLQMNSLRAEDTAVYYCAKHYYYGGSYAMDYWGQGTLVTVSSTTTPAPRPPTPAPTIASQPLSLRPEACRPAAGGAVHTRGLDFACDIYIWAPLAGTCGVLLLSLVITKRGRKKLLYIFKQPFMRPVQTTQEEDGCSCRFPEEEEGGCELRVKFSRSADAPAYQQGQNQLYNELNLGRREEYDVLDKRRGRDPEMGGKPRRKNPQEGLYNELQKDKMAEAYSEIGMKGERRRGKGHDGLYQGLSTATKDTYDALHMQALPPR

SEQ ID NO: 220 - DNA, 3515 bp, Artificial Sequence
  Synthesized
atggccttaccagtgaccgccttgctcctgccgctggccttgctgctccacgccgccaggccggatattgtgatgacccagtccccgtcctccctgaccgtgaccgcgggcgaaaaagtgaccatgatttgcaaatcctcccagtccctgctgaattccggcgatcagaaaaattatctgacctggtatcagcagaaaccgggccagccgccgaaactgctgattttttgggcgtccacccgtgaatccggcgtgccggatcgttttaccggctccggctccggcaccgattttaccctgaccatttcctccgtgcaggcggaagatctggcggtgtattattgccagaatgattattcctatccgctgacctttggcgcgggcaccaaactggaactgaaaggcggcggcggctccggcggcggcggctccggcggcggcggctcccaggtgcagctgcagcagtccgatgcggaactggtgaaaccgggctcctccgtgaaaatttcctgcaaagcgtccggctatacctttaccgatcatgcgattcattgggtgaaacagaaaccggaacagggcctggaatggattggccatttttccccgggcaataccgatattaaatataatgataaatttaaaggcaaagcgaccctgaccgtggatcgttcctcctccaccgcgtatatgcagctgaattccctgacctccgaagattccgcggtgtatttttgcaaaacctccacctttttttttgattattggggccagggcaccaccctgaccgtgtcctccaccacgacgccagcgccgcgaccaccaacaccggcgcccaccatcgcgtcgcagcccctgtccctgcgcccagaggcgtgccggccagcggcggggggcgcagtgcacacgagggggctggacttcgcctgtgatatctacatctgggcgcccttggccgggacttgtggggtccttctcctgtcactggttatcaccaaacggggcagaaagaaactcctgtatatattcaaacaaccatttatgagaccagtacaaactactcaagaggaagatggctgtagctgccgatttccagaagaagaagaaggaggatgtgaactgagagtgaagttcagcaggagcgcagacgcccccgcgtacaagcagggccagaaccagctctataacgagctcaatctaggacgaagagaggagtacgatgttttggacaagaggcgtggccgggaccctgagatggggggaaagccgagaaggaagaaccctcaggaaggcctgtacaatgaactgcagaaagataagatggcggaggcctacagtgagattgggatgaaaggcgagcgccggaggggcaaggggcacgatggcctttaccagggtctcagtacagccaccaaggacacctacgacgcccttcacatgcaggccctgccccctcgctaatctagaggcgcgcccctctccctcccccccccctaacgttactggccgaagccgcttggaataaggccggtgtgcgtttgtctatatgttattttccaccatattgccgtcttttggcaatgtgagggcccggaaacctggccctgtcttcttgacgagcattcctaggggtctttcccctctcgccaaaggaatgcaaggtctgttgaatgtcgtgaaggaagcagttcctctggaagcttcttgaagacaaacaacgtctgtagcgaccctttgcaggcagcggaaccccccacctggcgacaggtgcctctgcggccaaaagccacgtgtataagatacacctgcaaaggcggcacaaccccagtgccacgttgtgagttggatagttgtggaaagagtcaaatggctctcctcaagcgtattcaacaaggggctgaaggatgcccagaaggtaccccattgtatgggatctgatctggggcctcggtacacatgctttacatgtgtttagtcgaggttaaaaaaacgtctaggccccccgaaccacggggacgtggttttcctttgaaaaacacgatgataatatggccacaacccatatgatggccttaccagtgaccgccttgctcctgccgctggccttgctgctccacgccgccaggccggatatccagatgacccagagcccgagcagcctgagcgcgagcgtgggtgatcgcgtgaccattacctgcagggcaagtcaggacattagtaaatatttaaattggtatcagcagaaaccgggtaaagcgccgaaactgttaatttatcatacatcaagattacactcaggcgtgccgtcgcgttttagcggctcgggttcgggcaccgattttaccctgaccatctcgagcttgcagccggaggacttcgccacctactattgccaacagggtaatacgcttccgtacacgttcggtcagggcaccaaagtggagatcaaaggtggcggtggctcgggcggtggtgggtcgggtggcggcggatctgaggtgcagctggtggagtctgggggaggcttggtacagcctggggggtccctgagactctcctgtgcagcctctggagtgtccctgcctgattatggcgtgtcctgggtccgccaggctccagggaaggggctggagtgggtttcagtgatctggggcagcgagacaacctactacaacagcgccctgaagtcccgattcaccatctccagagacaatgccaagaactcactgtatctgcaaatgaacagcctgagagccgaggacacggctgtgtattactgtgcgaagcactactactacggcggcagctacgctatggactactggggccaaggaaccctggtcaccgtgtcctcaaccacgacgccagcgccgcgaccaccaacaccggcgcccaccatcgcgtcgcagcccctgtccctgcgcccagaggcgtgccggccagcggcggggggcgcagtgcacacgagggggctggacttcgcctgtgatatctacatctgggcgcccttggccgggacttgtggggtccttctcctgtcactggttatcaccaaacggggcagaaagaaactcctgtatatattcaaacaaccatttatgagaccagtacaaactactcaagaggaagatggctgtagctgccgatttccagaagaagaagaaggaggatgtgaactgagagtgaagttcagcaggagcgcagacgcccccgcgtacaagcagggccagaaccagctctataacgagctcaatctaggacgaagagaggagtacgatgttttggacaagaggcgtggccgggaccctgagatggggggaaagccgagaaggaagaaccctcaggaaggcctgtacaatgaactgcagaaagataagatggcggaggcctacagtgagattgggatgaaaggcgagcgccggaggggcaaggggcacgatggcctttaccagggtctcagtacagccaccaaggacacctacgacgcccttcacatgcaggccctgccccctcgctaa

SEQ ID NO: 221 - protein, 3533 aa, Artificial Sequence
  Synthesized
ATGGCCTTACCAGTGACCGCCTTGCTCCTGCCGCTGGCCTTGCTGCTCCACGCCGCCAGGCCGGACATCGTGATGACCCAGTCCCCCTCCAGCCTGACAGTGACAGCCGGCGAGAAGGTGACAATGATCTGTAAGTCCAGCCAGAGCCTGCTGAACAGCGGCGACCAGAAGAACTACCTGACCTGGTACCAGCAGAAGCCTGGCCAGCCCCCCAAGCTGCTGATCTTCTGGGCCAGCACAAGGGAGAGCGGCGTGCCCGACAGATTCACAGGCAGCGGCAGCGGCACCGACTTCACACTGACCATTTCCTCCGTGCAGGCCGAGGACCTCGCCGTGTACTACTGCCAGAACGACTACTCCTACCCCCTGACATTCGGCGCCGGCACCAAACTGGAGCTGAAGGGTGGCGGTGGCTCGGGCGGTGGTGGGTCGGGTGGCGGCGGATCTCAGGTGCAGCTCCAGCAGTCCGATGCCGAGCTGGTGAAGCCCGGAAGCAGCGTCAAGATCAGCTGTAAGGCCTCCGGCTACACCTTCACAGACCACGCCATCCACTGGGTGAAGCAGAAGCCCGAGCAGGGCCTGGAGTGGATCGGCCACTTTAGCCCCGGAAACACCGACATCAAGTACAACGACAAGTTCAAGGGCAAGGCCACCCTGACCGTGGACAGGAGCAGCAGCACCGCCTACATGCAGCTGAACAGCCTGACAAGCGAGGACAGCGCCGTGTACTTCTGCAAGACCTCCACCTTCTTCTTCGACTACTGGGGCCAGGGAACCACCCTGACAGTGTCCAGCACCACGACGCCAGCGCCGCGACCACCAACACCGGCGCCCACCATCGCGTCGCAGCCCCTGTCCCTGCGCCCAGAGGCGTGCCGGCCAGCGGCGGGGGGCGCAGTGCACACGAGGGGGCTGGACTTCGCCTGTGATATCTACATCTGGGCGCCCTTGGCCGGGACTTGTGGGGTCCTTCTCCTGTCACTGGTTATCACCCTTTACTGCAAACGGGGCAGAAAGAAACTCCTGTATATATTCAAACAACCATTTATGAGACCAGTACAAACTACTCAAGAGGAAGATGGCTGTAGCTGCCGATTTCCAGAAGAAGAAGAAGGAGGATGTGAACTGAGAGTGAAGTTCAGCAGGAGCGCAGACGCCCCCGCGTACAAGCAGGGCCAGAACCAGCTCTATAACGAGCTCAATCTAGGACGAAGAGAGGAGTACGATGTTTTGGACAAGAGGCGTGGCCGGGACCCTGAGATGGGGGGAAAGCCGAGAAGGAAGAACCCTCAGGAAGGCCTGTACAATGAACTGCAGAAAGATAAGATGGCGGAGGCCTACAGTGAGATTGGGATGAAAGGCGAGCGCCGGAGGGGCAAGGGGCACGATGGCCTTTACCAGGGTCTCAGTACAGCCACCAAGGACACCTACGACGCCCTTCACATGCAGGCCCTGCCCCCTCGCTAATCTAGAGGCGCGCCCCTCTCCCTCCCCCCCCCCTAACGTTACTGGCCGAAGCCGCTTGGAATAAGGCCGGTGTGCGTTTGTCTATATGTTATTTTCCACCATATTGCCGTCTTTTGGCAATGTGAGGGCCCGGAAACCTGGCCCTGTCTTCTTGACGAGCATTCCTAGGGGTCTTTCCCCTCTCGCCAAAGGAATGCAAGGTCTGTTGAATGTCGTGAAGGAAGCAGTTCCTCTGGAAGCTTCTTGAAGACAAACAACGTCTGTAGCGACCCTTTGCAGGCAGCGGAACCCCCCACCTGGCGACAGGTGCCTCTGCGGCCAAAAGCCACGTGTATAAGATACACCTGCAAAGGCGGCACAACCCCAGTGCCACGTTGTGAGTTGGATAGTTGTGGAAAGAGTCAAATGGCTCTCCTCAAGCGTATTCAACAAGGGGCTGAAGGATGCCCAGAAGGTACCCCATTGTATGGGATCTGATCTGGGGCCTCGGTACACATGCTTTACATGTGTTTAGTCGAGGTTAAAAAAACGTCTAGGCCCCCCGAACCACGGGGACGTGGTTTTCCTTTGAAAAACACGATGATAATATGGCCACAACCCATATGATGGCCTTACCAGTGACCGCCTTGCTCCTGCCGCTGGCCTTGCTGCTCCACGCCGCCAGGCCGGATATCCAGATGACCCAGAGCCCGAGCAGCCTGAGCGCGAGCGTGGGTGATCGCGTGACCATTACCTGCAGGGCAAGTCAGGACATTAGTAAATATTTAAATTGGTATCAGCAGAAACCGGGTAAAGCGCCGAAACTGTTAATTTATCATACATCAAGATTACACTCAGGCGTGCCGTCGCGTTTTAGCGGCTCGGGTTCGGGCACCGATTTTACCCTGACCATCTCGAGCTTGCAGCCGGAGGACTTCGCCACCTACTATTGCCAACAGGGTAATACGCTTCCGTACACGTTCGGTCAGGGCACCAAAGTGGAGATCAAAGGTGGCGGTGGCTCGGGCGGTGGTGGGTCGGGTGGCGGCGGATCTGAGGTGCAGCTGGTGGAGTCTGGGGGAGGCTTGGTACAGCCTGGGGGGTCCCTGAGACTCTCCTGTGCAGCCTCTGGAGTGTCCCTGCCTGATTATGGCGTGTCCTGGGTCCGCCAGGCTCCAGGGAAGGGGCTGGAGTGGGTTTCAGTGATCTGGGGCAGCGAGACAACCTACTACAACAGCGCCCTGAAGTCCCGATTCACCATCTCCAGAGACAATGCCAAGAACTCACTGTATCTGCAAATGAACAGCCTGAGAGCCGAGGACACGGCTGTGTATTACTGTGCGAAGCACTACTACTACGGCGGCAGCTACGCTATGGACTACTGGGGCCAAGGAACCCTGGTCACCGTGTCCTCAACCACGACGCCAGCGCCGCGACCACCAACACCGGCGCCCACCATCGCGTCGCAGCCCCTGTCCCTGCGCCCAGAGGCGTGCCGGCCAGCGGCGGGGGGCGCAGTGCACACGAGGGGGCTGGACTTCGCCTGTGATATCTACATCTGGGCGCCCTTGGCCGGGACTTGTGGGGTCCTTCTCCTGTCACTGGTTATCACCCTTTACTGCAAACGGGGCAGAAAGAAACTCCTGTATATATTCAAACAACCATTTATGAGACCAGTACAAACTACTCAAGAGGAAGATGGCTGTAGCTGCCGATTTCCAGAAGAAGAAGAAGGAGGATGTGAACTGAGAGTGAAGTTCAGCAGGAGCGCAGACGCCCCCGCGTACAAGCAGGGCCAGAACCAGCTCTATAACGAGCTCAATCTAGGACGAAGAGAGGAGTACGATGTTTTGGACAAGAGGCGTGGCCGGGACCCTGAGATGGGGGGAAAGCCGAGAAGGAAGAACCCTCAGGAAGGCCTGTACAATGAACTGCAGAAAGATAAGATGGCGGAGGCCTACAGTGAGATTGGGATGAAAGGCGAGCGCCGGAGGGGCAAGGGGCACGATGGCCTTTACCAGGGTCTCAGTACAGCCACCAAGGACACCTACGACGCCCTTCACATGCAGGCCCTGCCCCCTCGCTAA

SEQ ID NO: 222 - DNA, 3524 bp, Artificial Sequence
  Synthesized
atggccttaccagtgaccgccttgctcctgccgctggccttgctgctccacgccgccaggccggacatcgtgatgacccagtccccctccagcctgacagtgacagccggcgagaaggtgacaatgatctgtaagtccagccagagcctgctgaacagcggcgaccagaagaactacctgacctggtaccagcagaagcctggccagccccccaagctgctgatcttctgggccagcacaagggagagcggcgtgcccgacagattcacaggcagcggcagcggcaccgacttcacactgaccatttcctccgtgcaggccgaggacctcgccgtgtactactgccagaacgactactcctaccccctgacattcggcgccggcaccaaactggagctgaagggtggcggtggctcgggcggtggtgggtcgggtggcggcggatctcaggtgcagctccagcagtccgatgccgagctggtgaagcccggaagcagcgtcaagatcagctgtaaggcctccggctacaccttcacagaccacgccatccactgggtgaagcagaagcccgagcagggcctggagtggatcggccactttagccccggaaacaccgacatcaagtacaacgacaagttcaagggcaaggccaccctgaccgtggacaggagcagcagcaccgcctacatgcagctgaacagcctgacaagcgaggacagcgccgtgtacttctgcaagacctccaccttcttcttcgactactggggccagggaaccaccctgacagtgtccagcaccacgacgccagcgccgcgaccaccaacaccggcgcccaccatcgcgtcgcagcccctgtccctgcgcccagaggcgtgccggccagcggcggggggcgcagtgcacacgagggggctggacttcgcctgtgatatctacatctgggcgcccttggccgggacttgtggggtccttctcctgtcactggttatcaccaaacggggcagaaagaaactcctgtatatattcaaacaaccatttatgagaccagtacaaactactcaagaggaagatggctgtagctgccgatttccagaagaagaagaaggaggatgtgaactgagagtgaagttcagcaggagcgcagacgcccccgcgtacaagcagggccagaaccagctctataacgagctcaatctaggacgaagagaggagtacgatgttttggacaagaggcgtggccgggaccctgagatggggggaaagccgagaaggaagaaccctcaggaaggcctgtacaatgaactgcagaaagataagatggcggaggcctacagtgagattgggatgaaaggcgagcgccggaggggcaaggggcacgatggcctttaccagggtctcagtacagccaccaaggacacctacgacgcccttcacatgcaggccctgccccctcgctaatctagaggcgcgcccctctccctcccccccccctaacgttactggccgaagccgcttggaataaggccggtgtgcgtttgtctatatgttattttccaccatattgccgtcttttggcaatgtgagggcccggaaacctggccctgtcttcttgacgagcattcctaggggtctttcccctctcgccaaaggaatgcaaggtctgttgaatgtcgtgaaggaagcagttcctctggaagcttcttgaagacaaacaacgtctgtagcgaccctttgcaggcagcggaaccccccacctggcgacaggtgcctctgcggccaaaagccacgtgtataagatacacctgcaaaggcggcacaaccccagtgccacgttgtgagttggatagttgtggaaagagtcaaatggctctcctcaagcgtattcaacaaggggctgaaggatgcccagaaggtaccccattgtatgggatctgatctggggcctcggtacacatgctttacatgtgtttagtcgaggttaaaaaaacgtctaggccccccgaaccacggggacgtggttttcctttgaaaaacacgatgataatatggccacaacccatatgatggccttaccagtgaccgccttgctcctgccgctggccttgctgctccacgccgccaggccggatatccagatgacccagagcccgagcagcctgagcgcgagcgtgggtgatcgcgtgaccattacctgcagggcaagtcaggacattagtaaatatttaaattggtatcagcagaaaccgggtaaagcgccgaaactgttaatttatcatacatcaagattacactcaggcgtgccgtcgcgttttagcggctcgggttcgggcaccgattttaccctgaccatctcgagcttgcagccggaggacttcgccacctactattgccaacagggtaatacgcttccgtacacgttcggtcagggcaccaaagtggagatcaaaggtggcggtggctcgggcggtggtgggtcgggtggcggcggatctgaggtgcagctggtggagtctgggggaggcttggtacagcctggggggtccctgagactctcctgtgcagcctctggagtgtccctgcctgattatggcgtgtcctgggtccgccaggctccagggaaggggctggagtgggtttcagtgatctggggcagcgagacaacctactacaacagcgccctgaagtcccgattcaccatctccagagacaatgccaagaactcactgtatctgcaaatgaacagcctgagagccgaggacacggctgtgtattactgtgcgaagcactactactacggcggcagctacgctatggactactggggccaaggaaccctggtcaccgtgtcctcaaccacgacgccagcgccgcgaccaccaacaccggcgcccaccatcgcgtcgcagcccctgtccctgcgcccagaggcgtgccggccagcggcggggggcgcagtgcacacgagggggctggacttcgcctgtgatatctacatctgggcgcccttggccgggacttgtggggtccttctcctgtcactggttatcaccctttactgcaaacggggcagaaagaaactcctgtatatattcaaacaaccatttatgagaccagtacaaactactcaagaggaagatggctgtagctgccgatttccagaagaagaagaaggaggatgtgaactgagagtgaagttcagcaggagcgcagacgcccccgcgtacaagcagggccagaaccagctctataacgagctcaatctaggacgaagagaggagtacgatgttttggacaagaggcgtggccgggaccctgagatggggggaaagccgagaaggaagaaccctcaggaaggcctgtacaatgaactgcagaaagataagatggcggaggcctacagtgagattgggatgaaaggcgagcgccggaggggcaaggggcacgatggcctttaccagggtctcagtacagccaccaaggacacctacgacgcccttcacatgcaggccctgccccctcgctaa

SEQ ID NO: 223 - DNA, 3524 bp, Artificial Sequence
  Synthesized
atggccttaccagtgaccgccttgctcctgccgctggccttgctgctccacgccgccaggccggacatcgtgatgacccagtccccctccagcctgacagtgacagccggcgagaaggtgacaatgatctgtaagtccagccagagcctgctgaacagcggcgaccagaagaactacctgacctggtaccagcagaagcctggccagccccccaagctgctgatcttctgggccagcacaagggagagcggcgtgcccgacagattcacaggcagcggcagcggcaccgacttcacactgaccatttcctccgtgcaggccgaggacctcgccgtgtactactgccagaacgactactcctaccccctgacattcggcgccggcaccaaactggagctgaagggtggcggtggctcgggcggtggtgggtcgggtggcggcggatctcaggtgcagctccagcagtccgatgccgagctggtgaagcccggaagcagcgtcaagatcagctgtaaggcctccggctacaccttcacagaccacgccatccactgggtgaagcagaagcccgagcagggcctggagtggatcggccactttagccccggaaacaccgacatcaagtacaacgacaagttcaagggcaaggccaccctgaccgtggacaggagcagcagcaccgcctacatgcagctgaacagcctgacaagcgaggacagcgccgtgtacttctgcaagacctccaccttcttcttcgactactggggccagggaaccaccctgacagtgtccagcaccacgacgccagcgccgcgaccaccaacaccggcgcccaccatcgcgtcgcagcccctgtccctgcgcccagaggcgtgccggccagcggcggggggcgcagtgcacacgagggggctggacttcgcctgtgatatctacatctgggcgcccttggccgggacttgtggggtccttctcctgtcactggttatcaccctttactgcaaacggggcagaaagaaactcctgtatatattcaaacaaccatttatgagaccagtacaaactactcaagaggaagatggctgtagctgccgatttccagaagaagaagaaggaggatgtgaactgagagtgaagttcagcaggagcgcagacgcccccgcgtacaagcagggccagaaccagctctataacgagctcaatctaggacgaagagaggagtacgatgttttggacaagaggcgtggccgggaccctgagatggggggaaagccgagaaggaagaaccctcaggaaggcctgtacaatgaactgcagaaagataagatggcggaggcctacagtgagattgggatgaaaggcgagcgccggaggggcaaggggcacgatggcctttaccagggtctcagtacagccaccaaggacacctacgacgcccttcacatgcaggccctgccccctcgctaatctagaggcgcgcccctctccctcccccccccctaacgttactggccgaagccgcttggaataaggccggtgtgcgtttgtctatatgttattttccaccatattgccgtcttttggcaatgtgagggcccggaaacctggccctgtcttcttgacgagcattcctaggggtctttcccctctcgccaaaggaatgcaaggtctgttgaatgtcgtgaaggaagcagttcctctggaagcttcttgaagacaaacaacgtctgtagcgaccctttgcaggcagcggaaccccccacctggcgacaggtgcctctgcggccaaaagccacgtgtataagatacacctgcaaaggcggcacaaccccagtgccacgttgtgagttggatagttgtggaaagagtcaaatggctctcctcaagcgtattcaacaaggggctgaaggatgcccagaaggtaccccattgtatgggatctgatctggggcctcggtacacatgctttacatgtgtttagtcgaggttaaaaaaacgtctaggccccccgaaccacggggacgtggttttcctttgaaaaacacgatgataatatggccacaacccatatgatggccttaccagtgaccgccttgctcctgccgctggccttgctgctccacgccgccaggccggatatccagatgacccagagcccgagcagcctgagcgcgagcgtgggtgatcgcgtgaccattacctgcagggcaagtcaggacattagtaaatatttaaattggtatcagcagaaaccgggtaaagcgccgaaactgttaatttatcatacatcaagattacactcaggcgtgccgtcgcgttttagcggctcgggttcgggcaccgattttaccctgaccatctcgagcttgcagccggaggacttcgccacctactattgccaacagggtaatacgcttccgtacacgttcggtcagggcaccaaagtggagatcaaaggtggcggtggctcgggcggtggtgggtcgggtggcggcggatctgaggtgcagctggtggagtctgggggaggcttggtacagcctggggggtccctgagactctcctgtgcagcctctggagtgtccctgcctgattatggcgtgtcctgggtccgccaggctccagggaaggggctggagtgggtttcagtgatctggggcagcgagacaacctactacaacagcgccctgaagtcccgattcaccatctccagagacaatgccaagaactcactgtatctgcaaatgaacagcctgagagccgaggacacggctgtgtattactgtgcgaagcactactactacggcggcagctacgctatggactactggggccaaggaaccctggtcaccgtgtcctcaaccacgacgccagcgccgcgaccaccaacaccggcgcccaccatcgcgtcgcagcccctgtccctgcgcccagaggcgtgccggccagcggcggggggcgcagtgcacacgagggggctggacttcgcctgtgatatctacatctgggcgcccttggccgggacttgtggggtccttctcctgtcactggttatcaccaaacggggcagaaagaaactcctgtatatattcaaacaaccatttatgagaccagtacaaactactcaagaggaagatggctgtagctgccgatttccagaagaagaagaaggaggatgtgaactgagagtgaagttcagcaggagcgcagacgcccccgcgtacaagcagggccagaaccagctctataacgagctcaatctaggacgaagagaggagtacgatgttttggacaagaggcgtggccgggaccctgagatggggggaaagccgagaaggaagaaccctcaggaaggcctgtacaatgaactgcagaaagataagatggcggaggcctacagtgagattgggatgaaaggcgagcgccggaggggcaaggggcacgatggcctttaccagggtctcagtacagccaccaaggacacctacgacgcccttcacatgcaggccctgccccctcgctaa

SEQ ID NO: 224 - DNA, 3515 bp, Artificial Sequence
  Synthesized
atggccttaccagtgaccgccttgctcctgccgctggccttgctgctccacgccgccaggccggacatcgtgatgacccagtccccctccagcctgacagtgacagccggcgagaaggtgacaatgatctgtaagtccagccagagcctgctgaacagcggcgaccagaagaactacctgacctggtaccagcagaagcctggccagccccccaagctgctgatcttctgggccagcacaagggagagcggcgtgcccgacagattcacaggcagcggcagcggcaccgacttcacactgaccatttcctccgtgcaggccgaggacctcgccgtgtactactgccagaacgactactcctaccccctgacattcggcgccggcaccaaactggagctgaagggtggcggtggctcgggcggtggtgggtcgggtggcggcggatctcaggtgcagctccagcagtccgatgccgagctggtgaagcccggaagcagcgtcaagatcagctgtaaggcctccggctacaccttcacagaccacgccatccactgggtgaagcagaagcccgagcagggcctggagtggatcggccactttagccccggaaacaccgacatcaagtacaacgacaagttcaagggcaaggccaccctgaccgtggacaggagcagcagcaccgcctacatgcagctgaacagcctgacaagcgaggacagcgccgtgtacttctgcaagacctccaccttcttcttcgactactggggccagggaaccaccctgacagtgtccagcaccacgacgccagcgccgcgaccaccaacaccggcgcccaccatcgcgtcgcagcccctgtccctgcgcccagaggcgtgccggccagcggcggggggcgcagtgcacacgagggggctggacttcgcctgtgatatctacatctgggcgcccttggccgggacttgtggggtccttctcctgtcactggttatcaccaaacggggcagaaagaaactcctgtatatattcaaacaaccatttatgagaccagtacaaactactcaagaggaagatggctgtagctgccgatttccagaagaagaagaaggaggatgtgaactgagagtgaagttcagcaggagcgcagacgcccccgcgtacaagcagggccagaaccagctctataacgagctcaatctaggacgaagagaggagtacgatgttttggacaagaggcgtggccgggaccctgagatggggggaaagccgagaaggaagaaccctcaggaaggcctgtacaatgaactgcagaaagataagatggcggaggcctacagtgagattgggatgaaaggcgagcgccggaggggcaaggggcacgatggcctttaccagggtctcagtacagccaccaaggacacctacgacgcccttcacatgcaggccctgccccctcgctaatctagaggcgcgcccctctccctcccccccccctaacgttactggccgaagccgcttggaataaggccggtgtgcgtttgtctatatgttattttccaccatattgccgtcttttggcaatgtgagggcccggaaacctggccctgtcttcttgacgagcattcctaggggtctttcccctctcgccaaaggaatgcaaggtctgttgaatgtcgtgaaggaagcagttcctctggaagcttcttgaagacaaacaacgtctgtagcgaccctttgcaggcagcggaaccccccacctggcgacaggtgcctctgcggccaaaagccacgtgtataagatacacctgcaaaggcggcacaaccccagtgccacgttgtgagttggatagttgtggaaagagtcaaatggctctcctcaagcgtattcaacaaggggctgaaggatgcccagaaggtaccccattgtatgggatctgatctggggcctcggtacacatgctttacatgtgtttagtcgaggttaaaaaaacgtctaggccccccgaaccacggggacgtggttttcctttgaaaaacacgatgataatatggccacaacccatatgatggccttaccagtgaccgccttgctcctgccgctggccttgctgctccacgccgccaggccggatatccagatgacccagagcccgagcagcctgagcgcgagcgtgggtgatcgcgtgaccattacctgcagggcaagtcaggacattagtaaatatttaaattggtatcagcagaaaccgggtaaagcgccgaaactgttaatttatcatacatcaagattacactcaggcgtgccgtcgcgttttagcggctcgggttcgggcaccgattttaccctgaccatctcgagcttgcagccggaggacttcgccacctactattgccaacagggtaatacgcttccgtacacgttcggtcagggcaccaaagtggagatcaaaggtggcggtggctcgggcggtggtgggtcgggtggcggcggatctgaggtgcagctggtggagtctgggggaggcttggtacagcctggggggtccctgagactctcctgtgcagcctctggagtgtccctgcctgattatggcgtgtcctgggtccgccaggctccagggaaggggctggagtgggtttcagtgatctggggcagcgagacaacctactacaacagcgccctgaagtcccgattcaccatctccagagacaatgccaagaactcactgtatctgcaaatgaacagcctgagagccgaggacacggctgtgtattactgtgcgaagcactactactacggcggcagctacgctatggactactggggccaaggaaccctggtcaccgtgtcctcaaccacgacgccagcgccgcgaccaccaacaccggcgcccaccatcgcgtcgcagcccctgtccctgcgcccagaggcgtgccggccagcggcggggggcgcagtgcacacgagggggctggacttcgcctgtgatatctacatctgggcgcccttggccgggacttgtggggtccttctcctgtcactggttatcaccaaacggggcagaaagaaactcctgtatatattcaaacaaccatttatgagaccagtacaaactactcaagaggaagatggctgtagctgccgatttccagaagaagaagaaggaggatgtgaactgagagtgaagttcagcaggagcgcagacgcccccgcgtacaagcagggccagaaccagctctataacgagctcaatctaggacgaagagaggagtacgatgttttggacaagaggcgtggccgggaccctgagatggggggaaagccgagaaggaagaaccctcaggaaggcctgtacaatgaactgcagaaagataagatggcggaggcctacagtgagattgggatgaaaggcgagcgccggaggggcaaggggcacgatggcctttaccagggtctcagtacagccaccaaggacacctacgacgcccttcacatgcaggccctgccccctcgctaa

SEQ ID NO: 225 - DNA, 3545 bp, Artificial Sequence
  Synthesized
atggccttaccagtgaccgccttgctcctgccgctggccttgctgctccacgccgccaggccggatattgtgatgacccagtccccgtcctccctgaccgtgaccgcgggcgaaaaagtgaccatgatttgcaaatcctcccagtccctgctgaattccggcgatcagaaaaattatctgacctggtatcagcagaaaccgggccagccgccgaaactgctgattttttgggcgtccacccgtgaatccggcgtgccggatcgttttaccggctccggctccggcaccgattttaccctgaccatttcctccgtgcaggcggaagatctggcggtgtattattgccagaatgattattcctatccgctgacctttggcgcgggcaccaaactggaactgaaaggcggcggcggctccggcggcggcggctccggcggcggcggctcccaggtgcagctgcagcagtccgatgcggaactggtgaaaccgggctcctccgtgaaaatttcctgcaaagcgtccggctatacctttaccgatcatgcgattcattgggtgaaacagaaaccggaacagggcctggaatggattggccatttttccccgggcaataccgatattaaatataatgataaatttaaaggcaaagcgaccctgaccgtggatcgttcctcctccaccgcgtatatgcagctgaattccctgacctccgaagattccgcggtgtatttttgcaaaacctccacctttttttttgattattggggccagggcaccaccctgaccgtgtcctccaccacgacgccagcgccgcgaccaccaacaccggcgcccaccatcgcgtcgcagcccctgtccctgcgcccagaggcgtgccggccagcggcggggggcgcagtgcacacgagggggctggacttcgcctgtgatatctacatctgggcgcccttggccgggacttgtggggtccttctcctgtcactggttatcaccctttactgcaaacggggcagaaagaaactcctgtatatattcaaacaaccatttatgagaccagtacaaactactcaagaggaagatggctgtagctgccgatttccagaagaagaagaaggaggatgtgaactgagagtgaagttcagcaggagcgcagacgcccccgcgtacaagcagggccagaaccagctctataacgagctcaatctaggacgaagagaggagtacgatgttttggacaagaggcgtggccgggaccctgagatggggggaaagccgagaaggaagaaccctcaggaaggcctgtacaatgaactgcagaaagataagatggcggaggcctacagtgagattgggatgaaaggcgagcgccggaggggcaaggggcacgatggcctttaccagggtctcagtacagccaccaaggacacctacgacgcccttcacatgcaggccctgccccctcgctaatctagaggcgcgcccctctccctcccccccccctaacgttactggccgaagccgcttggaataaggccggtgtgcgtttgtctatatgttattttccaccatattgccgtcttttggcaatgtgagggcccggaaacctggccctgtcttcttgacgagcattcctaggggtctttcccctctcgccaaaggaatgcaaggtctgttgaatgtcgtgaaggaagcagttcctctggaagcttcttgaagacaaacaacgtctgtagcgaccctttgcaggcagcggaaccccccacctggcgacaggtgcctctgcggccaaaagccacgtgtataagatacacctgcaaaggcggcacaaccccagtgccacgttgtgagttggatagttgtggaaagagtcaaatggctctcctcaagcgtattcaacaaggggctgaaggatgcccagaaggtaccccattgtatgggatctgatctggggcctcggtacacatgctttacatgtgtttagtcgaggttaaaaaaacgtctaggccccccgaaccacggggacgtggttttcctttgaaaaacacgatgataatatggccacaacccatatgatggccttaccagtgaccgccttgctcctgccgctggccttgctgctccacgccgccaggccggatatccagatgacccagagcccaagctccctgtccgcctctgtgggcgacagggtgaccatcacatgccgcgccagccagacaatctggtcctacctgaactggtatcagcagagacccggcaaggcccctaatctgctgatctacgcagcatctagcctgcagtctggagtgccctcccggttctctggaagaggatccggaaccgacttcaccctgacaatctcctctctgcaggccgaggacttcgccacatactattgccagcagagctattccatccctcagacctttggccagggcacaaagctggagatcaagggcggcggcggctctggaggaggaggaagcggaggaggaggatcccaggtgcagctgcagcagagcggaccaggactggtgaagccctcccagaccctgtctctgacatgtgccatcagcggcgattccgtgagctccaacagcgccgcctggaattggatccggcagtctcccagcagaggactggagtggctgggaaggacctactatcgctccaagtggtacaacgattatgccgtgtctgtgaagagccggatcaccatcaaccctgacacatctaagaatcagttcagcctgcagctgaattccgtgaccccagaggacacagccgtgtactattgtgcaagggaggtgaccggcgacctggaggatgcctttgacatctggggccagggcaccatggtgacagtgtctagcaccacgacgccagcgccgcgaccaccaacaccggcgcccaccatcgcgtcgcagcccctgtccctgcgcccagaggcgtgccggccagcggcggggggcgcagtgcacacgagggggctggacttcgcctgtgatatctacatctgggcgcccttggccgggacttgtggggtccttctcctgtcactggttatcaccctttactgcaaacggggcagaaagaaactcctgtatatattcaaacaaccatttatgagaccagtacaaactactcaagaggaagatggctgtagctgccgatttccagaagaagaagaaggaggatgtgaactgagagtgaagttcagcaggagcgcagacgcccccgcgtacaagcagggccagaaccagctctataacgagctcaatctaggacgaagagaggagtacgatgttttggacaagaggcgtggccgggaccctgagatggggggaaagccgagaaggaagaaccctcaggaaggcctgtacaatgaactgcagaaagataagatggcggaggcctacagtgagattgggatgaaaggcgagcgccggaggggcaaggggcacgatggcctttaccagggtctcagtacagccaccaaggacacctacgacgcccttcacatgcaggccctgccccctcgctaa

SEQ ID NO: 226 - protein, 490 aa, Artificial Sequence
  Synthesized
MALPVTALLLPLALLLHAARPDIQMTQSPSSLSASVGDRVTITCRASQTIWSYLNWYQQRPGKAPNLLIYAASSLQSGVPSRFSGRGSGTDFTLTISSLQAEDFATYYCQQSYSIPQTFGQGTKLEIKGGGGSGGGGSGGGGSQVQLQQSGPGLVKPSQTLSLTCAISGDSVSSNSAAWNWIRQSPSRGLEWLGRTYYRSKWYNDYAVSVKSRITINPDTSKNQFSLQLNSVTPEDTAVYYCAREVTGDLEDAFDIWGQGTMVTVSSTTTPAPRPPTPAPTIASQPLSLRPEACRPAAGGAVHTRGLDFACDIYIWAPLAGTCGVLLLSLVITLYCKRGRKKLLYIFKQPFMRPVQTTQEEDGCSCRFPEEEEGGCELRVKFSRSADAPAYQQGQNQLYNELNLGRREEYDVLDKRRGRDPEMGGKPRRKNPQEGLYNELQKDKMAEAYSEIGMKGERRRGKGHDGLYQGLSTATKDTYDALHMQALPPR

SEQ ID NO: 227 - DNA, 3536 bp, Artificial Sequence
  Synthesized
atggccttaccagtgaccgccttgctcctgccgctggccttgctgctccacgccgccaggccggatattgtgatgacccagtccccgtcctccctgaccgtgaccgcgggcgaaaaagtgaccatgatttgcaaatcctcccagtccctgctgaattccggcgatcagaaaaattatctgacctggtatcagcagaaaccgggccagccgccgaaactgctgattttttgggcgtccacccgtgaatccggcgtgccggatcgttttaccggctccggctccggcaccgattttaccctgaccatttcctccgtgcaggcggaagatctggcggtgtattattgccagaatgattattcctatccgctgacctttggcgcgggcaccaaactggaactgaaaggcggcggcggctccggcggcggcggctccggcggcggcggctcccaggtgcagctgcagcagtccgatgcggaactggtgaaaccgggctcctccgtgaaaatttcctgcaaagcgtccggctatacctttaccgatcatgcgattcattgggtgaaacagaaaccggaacagggcctggaatggattggccatttttccccgggcaataccgatattaaatataatgataaatttaaaggcaaagcgaccctgaccgtggatcgttcctcctccaccgcgtatatgcagctgaattccctgacctccgaagattccgcggtgtatttttgcaaaacctccacctttttttttgattattggggccagggcaccaccctgaccgtgtcctccaccacgacgccagcgccgcgaccaccaacaccggcgcccaccatcgcgtcgcagcccctgtccctgcgcccagaggcgtgccggccagcggcggggggcgcagtgcacacgagggggctggacttcgcctgtgatatctacatctgggcgcccttggccgggacttgtggggtccttctcctgtcactggttatcaccaaacggggcagaaagaaactcctgtatatattcaaacaaccatttatgagaccagtacaaactactcaagaggaagatggctgtagctgccgatttccagaagaagaagaaggaggatgtgaactgagagtgaagttcagcaggagcgcagacgcccccgcgtacaagcagggccagaaccagctctataacgagctcaatctaggacgaagagaggagtacgatgttttggacaagaggcgtggccgggaccctgagatggggggaaagccgagaaggaagaaccctcaggaaggcctgtacaatgaactgcagaaagataagatggcggaggcctacagtgagattgggatgaaaggcgagcgccggaggggcaaggggcacgatggcctttaccagggtctcagtacagccaccaaggacacctacgacgcccttcacatgcaggccctgccccctcgctaatctagaggcgcgcccctctccctcccccccccctaacgttactggccgaagccgcttggaataaggccggtgtgcgtttgtctatatgttattttccaccatattgccgtcttttggcaatgtgagggcccggaaacctggccctgtcttcttgacgagcattcctaggggtctttcccctctcgccaaaggaatgcaaggtctgttgaatgtcgtgaaggaagcagttcctctggaagcttcttgaagacaaacaacgtctgtagcgaccctttgcaggcagcggaaccccccacctggcgacaggtgcctctgcggccaaaagccacgtgtataagatacacctgcaaaggcggcacaaccccagtgccacgttgtgagttggatagttgtggaaagagtcaaatggctctcctcaagcgtattcaacaaggggctgaaggatgcccagaaggtaccccattgtatgggatctgatctggggcctcggtacacatgctttacatgtgtttagtcgaggttaaaaaaacgtctaggccccccgaaccacggggacgtggttttcctttgaaaaacacgatgataatatggccacaacccatatgatggccttaccagtgaccgccttgctcctgccgctggccttgctgctccacgccgccaggccggatatccagatgacccagagcccaagctccctgtccgcctctgtgggcgacagggtgaccatcacatgccgcgccagccagacaatctggtcctacctgaactggtatcagcagagacccggcaaggcccctaatctgctgatctacgcagcatctagcctgcagtctggagtgccctcccggttctctggaagaggatccggaaccgacttcaccctgacaatctcctctctgcaggccgaggacttcgccacatactattgccagcagagctattccatccctcagacctttggccagggcacaaagctggagatcaagggcggcggcggctctggaggaggaggaagcggaggaggaggatcccaggtgcagctgcagcagagcggaccaggactggtgaagccctcccagaccctgtctctgacatgtgccatcagcggcgattccgtgagctccaacagcgccgcctggaattggatccggcagtctcccagcagaggactggagtggctgggaaggacctactatcgctccaagtggtacaacgattatgccgtgtctgtgaagagccggatcaccatcaaccctgacacatctaagaatcagttcagcctgcagctgaattccgtgaccccagaggacacagccgtgtactattgtgcaagggaggtgaccggcgacctggaggatgcctttgacatctggggccagggcaccatggtgacagtgtctagcaccacgacgccagcgccgcgaccaccaacaccggcgcccaccatcgcgtcgcagcccctgtccctgcgcccagaggcgtgccggccagcggcggggggcgcagtgcacacgagggggctggacttcgcctgtgatatctacatctgggcgcccttggccgggacttgtggggtccttctcctgtcactggttatcaccctttactgcaaacggggcagaaagaaactcctgtatatattcaaacaaccatttatgagaccagtacaaactactcaagaggaagatggctgtagctgccgatttccagaagaagaagaaggaggatgtgaactgagagtgaagttcagcaggagcgcagacgcccccgcgtacaagcagggccagaaccagctctataacgagctcaatctaggacgaagagaggagtacgatgttttggacaagaggcgtggccgggaccctgagatggggggaaagccgagaaggaagaaccctcaggaaggcctgtacaatgaactgcagaaagataagatggcggaggcctacagtgagattgggatgaaaggcgagcgccggaggggcaaggggcacgatggcctttaccagggtctcagtacagccaccaaggacacctacgacgcccttcacatgcaggccctgccccctcgctaa

SEQ ID NO: 228 - DNA, 3536 bp, Artificial Sequence
  Synthesized
atggccttaccagtgaccgccttgctcctgccgctggccttgctgctccacgccgccaggccggatattgtgatgacccagtccccgtcctccctgaccgtgaccgcgggcgaaaaagtgaccatgatttgcaaatcctcccagtccctgctgaattccggcgatcagaaaaattatctgacctggtatcagcagaaaccgggccagccgccgaaactgctgattttttgggcgtccacccgtgaatccggcgtgccggatcgttttaccggctccggctccggcaccgattttaccctgaccatttcctccgtgcaggcggaagatctggcggtgtattattgccagaatgattattcctatccgctgacctttggcgcgggcaccaaactggaactgaaaggcggcggcggctccggcggcggcggctccggcggcggcggctcccaggtgcagctgcagcagtccgatgcggaactggtgaaaccgggctcctccgtgaaaatttcctgcaaagcgtccggctatacctttaccgatcatgcgattcattgggtgaaacagaaaccggaacagggcctggaatggattggccatttttccccgggcaataccgatattaaatataatgataaatttaaaggcaaagcgaccctgaccgtggatcgttcctcctccaccgcgtatatgcagctgaattccctgacctccgaagattccgcggtgtatttttgcaaaacctccacctttttttttgattattggggccagggcaccaccctgaccgtgtcctccaccacgacgccagcgccgcgaccaccaacaccggcgcccaccatcgcgtcgcagcccctgtccctgcgcccagaggcgtgccggccagcggcggggggcgcagtgcacacgagggggctggacttcgcctgtgatatctacatctgggcgcccttggccgggacttgtggggtccttctcctgtcactggttatcaccctttactgcaaacggggcagaaagaaactcctgtatatattcaaacaaccatttatgagaccagtacaaactactcaagaggaagatggctgtagctgccgatttccagaagaagaagaaggaggatgtgaactgagagtgaagttcagcaggagcgcagacgcccccgcgtacaagcagggccagaaccagctctataacgagctcaatctaggacgaagagaggagtacgatgttttggacaagaggcgtggccgggaccctgagatggggggaaagccgagaaggaagaaccctcaggaaggcctgtacaatgaactgcagaaagataagatggcggaggcctacagtgagattgggatgaaaggcgagcgccggaggggcaaggggcacgatggcctttaccagggtctcagtacagccaccaaggacacctacgacgcccttcacatgcaggccctgccccctcgctaatctagaggcgcgcccctctccctcccccccccctaacgttactggccgaagccgcttggaataaggccggtgtgcgtttgtctatatgttattttccaccatattgccgtcttttggcaatgtgagggcccggaaacctggccctgtcttcttgacgagcattcctaggggtctttcccctctcgccaaaggaatgcaaggtctgttgaatgtcgtgaaggaagcagttcctctggaagcttcttgaagacaaacaacgtctgtagcgaccctttgcaggcagcggaaccccccacctggcgacaggtgcctctgcggccaaaagccacgtgtataagatacacctgcaaaggcggcacaaccccagtgccacgttgtgagttggatagttgtggaaagagtcaaatggctctcctcaagcgtattcaacaaggggctgaaggatgcccagaaggtaccccattgtatgggatctgatctggggcctcggtacacatgctttacatgtgtttagtcgaggttaaaaaaacgtctaggccccccgaaccacggggacgtggttttcctttgaaaaacacgatgataatatggccacaacccatatgatggccttaccagtgaccgccttgctcctgccgctggccttgctgctccacgccgccaggccggatatccagatgacccagagcccaagctccctgtccgcctctgtgggcgacagggtgaccatcacatgccgcgccagccagacaatctggtcctacctgaactggtatcagcagagacccggcaaggcccctaatctgctgatctacgcagcatctagcctgcagtctggagtgccctcccggttctctggaagaggatccggaaccgacttcaccctgacaatctcctctctgcaggccgaggacttcgccacatactattgccagcagagctattccatccctcagacctttggccagggcacaaagctggagatcaagggcggcggcggctctggaggaggaggaagcggaggaggaggatcccaggtgcagctgcagcagagcggaccaggactggtgaagccctcccagaccctgtctctgacatgtgccatcagcggcgattccgtgagctccaacagcgccgcctggaattggatccggcagtctcccagcagaggactggagtggctgggaaggacctactatcgctccaagtggtacaacgattatgccgtgtctgtgaagagccggatcaccatcaaccctgacacatctaagaatcagttcagcctgcagctgaattccgtgaccccagaggacacagccgtgtactattgtgcaagggaggtgaccggcgacctggaggatgcctttgacatctggggccagggcaccatggtgacagtgtctagcaccacgacgccagcgccgcgaccaccaacaccggcgcccaccatcgcgtcgcagcccctgtccctgcgcccagaggcgtgccggccagcggcggggggcgcagtgcacacgagggggctggacttcgcctgtgatatctacatctgggcgcccttggccgggacttgtggggtccttctcctgtcactggttatcaccaaacggggcagaaagaaactcctgtatatattcaaacaaccatttatgagaccagtacaaactactcaagaggaagatggctgtagctgccgatttccagaagaagaagaaggaggatgtgaactgagagtgaagttcagcaggagcgcagacgcccccgcgtacaagcagggccagaaccagctctataacgagctcaatctaggacgaagagaggagtacgatgttttggacaagaggcgtggccgggaccctgagatggggggaaagccgagaaggaagaaccctcaggaaggcctgtacaatgaactgcagaaagataagatggcggaggcctacagtgagattgggatgaaaggcgagcgccggaggggcaaggggcacgatggcctttaccagggtctcagtacagccaccaaggacacctacgacgcccttcacatgcaggccctgccccctcgctaa

SEQ ID NO: 229 - protein, 487 aa, Artificial Sequence
  Synthesized
MALPVTALLLPLALLLHAARPDIQMTQSPSSLSASVGDRVTITCRASQTIWSYLNWYQQRPGKAPNLLIYAASSLQSGVPSRFSGRGSGTDFTLTISSLQAEDFATYYCQQSYSIPQTFGQGTKLEIKGGGGSGGGGSGGGGSQVQLQQSGPGLVKPSQTLSLTCAISGDSVSSNSAAWNWIRQSPSRGLEWLGRTYYRSKWYNDYAVSVKSRITINPDTSKNQFSLQLNSVTPEDTAVYYCAREVTGDLEDAFDIWGQGTMVTVSSTTTPAPRPPTPAPTIASQPLSLRPEACRPAAGGAVHTRGLDFACDIYIWAPLAGTCGVLLLSLVITKRGRKKLLYIFKQPFMRPVQTTQEEDGCSCRFPEEEEGGCELRVKFSRSADAPAYQQGQNQLYNELNLGRREEYDVLDKRRGRDPEMGGKPRRKNPQEGLYNELQKDKMAEAYSEIGMKGERRRGKGHDGLYQGLSTATKDTYDALHMQALPPR

SEQ ID NO: 230 - DNA, 3527 bp, Artificial Sequence
  Synthesized
atggccttaccagtgaccgccttgctcctgccgctggccttgctgctccacgccgccaggccggatattgtgatgacccagtccccgtcctccctgaccgtgaccgcgggcgaaaaagtgaccatgatttgcaaatcctcccagtccctgctgaattccggcgatcagaaaaattatctgacctggtatcagcagaaaccgggccagccgccgaaactgctgattttttgggcgtccacccgtgaatccggcgtgccggatcgttttaccggctccggctccggcaccgattttaccctgaccatttcctccgtgcaggcggaagatctggcggtgtattattgccagaatgattattcctatccgctgacctttggcgcgggcaccaaactggaactgaaaggcggcggcggctccggcggcggcggctccggcggcggcggctcccaggtgcagctgcagcagtccgatgcggaactggtgaaaccgggctcctccgtgaaaatttcctgcaaagcgtccggctatacctttaccgatcatgcgattcattgggtgaaacagaaaccggaacagggcctggaatggattggccatttttccccgggcaataccgatattaaatataatgataaatttaaaggcaaagcgaccctgaccgtggatcgttcctcctccaccgcgtatatgcagctgaattccctgacctccgaagattccgcggtgtatttttgcaaaacctccacctttttttttgattattggggccagggcaccaccctgaccgtgtcctccaccacgacgccagcgccgcgaccaccaacaccggcgcccaccatcgcgtcgcagcccctgtccctgcgcccagaggcgtgccggccagcggcggggggcgcagtgcacacgagggggctggacttcgcctgtgatatctacatctgggcgcccttggccgggacttgtggggtccttctcctgtcactggttatcaccaaacggggcagaaagaaactcctgtatatattcaaacaaccatttatgagaccagtacaaactactcaagaggaagatggctgtagctgccgatttccagaagaagaagaaggaggatgtgaactgagagtgaagttcagcaggagcgcagacgcccccgcgtacaagcagggccagaaccagctctataacgagctcaatctaggacgaagagaggagtacgatgttttggacaagaggcgtggccgggaccctgagatggggggaaagccgagaaggaagaaccctcaggaaggcctgtacaatgaactgcagaaagataagatggcggaggcctacagtgagattgggatgaaaggcgagcgccggaggggcaaggggcacgatggcctttaccagggtctcagtacagccaccaaggacacctacgacgcccttcacatgcaggccctgccccctcgctaatctagaggcgcgcccctctccctcccccccccctaacgttactggccgaagccgcttggaataaggccggtgtgcgtttgtctatatgttattttccaccatattgccgtcttttggcaatgtgagggcccggaaacctggccctgtcttcttgacgagcattcctaggggtctttcccctctcgccaaaggaatgcaaggtctgttgaatgtcgtgaaggaagcagttcctctggaagcttcttgaagacaaacaacgtctgtagcgaccctttgcaggcagcggaaccccccacctggcgacaggtgcctctgcggccaaaagccacgtgtataagatacacctgcaaaggcggcacaaccccagtgccacgttgtgagttggatagttgtggaaagagtcaaatggctctcctcaagcgtattcaacaaggggctgaaggatgcccagaaggtaccccattgtatgggatctgatctggggcctcggtacacatgctttacatgtgtttagtcgaggttaaaaaaacgtctaggccccccgaaccacggggacgtggttttcctttgaaaaacacgatgataatatggccacaacccatatgatggccttaccagtgaccgccttgctcctgccgctggccttgctgctccacgccgccaggccggatatccagatgacccagagcccaagctccctgtccgcctctgtgggcgacagggtgaccatcacatgccgcgccagccagacaatctggtcctacctgaactggtatcagcagagacccggcaaggcccctaatctgctgatctacgcagcatctagcctgcagtctggagtgccctcccggttctctggaagaggatccggaaccgacttcaccctgacaatctcctctctgcaggccgaggacttcgccacatactattgccagcagagctattccatccctcagacctttggccagggcacaaagctggagatcaagggcggcggcggctctggaggaggaggaagcggaggaggaggatcccaggtgcagctgcagcagagcggaccaggactggtgaagccctcccagaccctgtctctgacatgtgccatcagcggcgattccgtgagctccaacagcgccgcctggaattggatccggcagtctcccagcagaggactggagtggctgggaaggacctactatcgctccaagtggtacaacgattatgccgtgtctgtgaagagccggatcaccatcaaccctgacacatctaagaatcagttcagcctgcagctgaattccgtgaccccagaggacacagccgtgtactattgtgcaagggaggtgaccggcgacctggaggatgcctttgacatctggggccagggcaccatggtgacagtgtctagcaccacgacgccagcgccgcgaccaccaacaccggcgcccaccatcgcgtcgcagcccctgtccctgcgcccagaggcgtgccggccagcggcggggggcgcagtgcacacgagggggctggacttcgcctgtgatatctacatctgggcgcccttggccgggacttgtggggtccttctcctgtcactggttatcaccaaacggggcagaaagaaactcctgtatatattcaaacaaccatttatgagaccagtacaaactactcaagaggaagatggctgtagctgccgatttccagaagaagaagaaggaggatgtgaactgagagtgaagttcagcaggagcgcagacgcccccgcgtacaagcagggccagaaccagctctataacgagctcaatctaggacgaagagaggagtacgatgttttggacaagaggcgtggccgggaccctgagatggggggaaagccgagaaggaagaaccctcaggaaggcctgtacaatgaactgcagaaagataagatggcggaggcctacagtgagattgggatgaaaggcgagcgccggaggggcaaggggcacgatggcctttaccagggtctcagtacagccaccaaggacacctacgacgcccttcacatgcaggccctgccccctcgctaa

SEQ ID NO: 231 - DNA, 3545 bp, Artificial Sequence
  Synthesized
atggccttaccagtgaccgccttgctcctgccgctggccttgctgctccacgccgccaggccggacatcgtgatgacccagtccccctccagcctgacagtgacagccggcgagaaggtgacaatgatctgtaagtccagccagagcctgctgaacagcggcgaccagaagaactacctgacctggtaccagcagaagcctggccagccccccaagctgctgatcttctgggccagcacaagggagagcggcgtgcccgacagattcacaggcagcggcagcggcaccgacttcacactgaccatttcctccgtgcaggccgaggacctcgccgtgtactactgccagaacgactactcctaccccctgacattcggcgccggcaccaaactggagctgaagggtggcggtggctcgggcggtggtgggtcgggtggcggcggatctcaggtgcagctccagcagtccgatgccgagctggtgaagcccggaagcagcgtcaagatcagctgtaaggcctccggctacaccttcacagaccacgccatccactgggtgaagcagaagcccgagcagggcctggagtggatcggccactttagccccggaaacaccgacatcaagtacaacgacaagttcaagggcaaggccaccctgaccgtggacaggagcagcagcaccgcctacatgcagctgaacagcctgacaagcgaggacagcgccgtgtacttctgcaagacctccaccttcttcttcgactactggggccagggaaccaccctgacagtgtccagcaccacgacgccagcgccgcgaccaccaacaccggcgcccaccatcgcgtcgcagcccctgtccctgcgcccagaggcgtgccggccagcggcggggggcgcagtgcacacgagggggctggacttcgcctgtgatatctacatctgggcgcccttggccgggacttgtggggtccttctcctgtcactggttatcaccctttactgcaaacggggcagaaagaaactcctgtatatattcaaacaaccatttatgagaccagtacaaactactcaagaggaagatggctgtagctgccgatttccagaagaagaagaaggaggatgtgaactgagagtgaagttcagcaggagcgcagacgcccccgcgtacaagcagggccagaaccagctctataacgagctcaatctaggacgaagagaggagtacgatgttttggacaagaggcgtggccgggaccctgagatggggggaaagccgagaaggaagaaccctcaggaaggcctgtacaatgaactgcagaaagataagatggcggaggcctacagtgagattgggatgaaaggcgagcgccggaggggcaaggggcacgatggcctttaccagggtctcagtacagccaccaaggacacctacgacgcccttcacatgcaggccctgccccctcgctaatctagaggcgcgcccctctccctcccccccccctaacgttactggccgaagccgcttggaataaggccggtgtgcgtttgtctatatgttattttccaccatattgccgtcttttggcaatgtgagggcccggaaacctggccctgtcttcttgacgagcattcctaggggtctttcccctctcgccaaaggaatgcaaggtctgttgaatgtcgtgaaggaagcagttcctctggaagcttcttgaagacaaacaacgtctgtagcgaccctttgcaggcagcggaaccccccacctggcgacaggtgcctctgcggccaaaagccacgtgtataagatacacctgcaaaggcggcacaaccccagtgccacgttgtgagttggatagttgtggaaagagtcaaatggctctcctcaagcgtattcaacaaggggctgaaggatgcccagaaggtaccccattgtatgggatctgatctggggcctcggtacacatgctttacatgtgtttagtcgaggttaaaaaaacgtctaggccccccgaaccacggggacgtggttttcctttgaaaaacacgatgataatatggccacaacccatatgatggccttaccagtgaccgccttgctcctgccgctggccttgctgctccacgccgccaggccggatatccagatgacccagagcccaagctccctgtccgcctctgtgggcgacagggtgaccatcacatgccgcgccagccagacaatctggtcctacctgaactggtatcagcagagacccggcaaggcccctaatctgctgatctacgcagcatctagcctgcagtctggagtgccctcccggttctctggaagaggatccggaaccgacttcaccctgacaatctcctctctgcaggccgaggacttcgccacatactattgccagcagagctattccatccctcagacctttggccagggcacaaagctggagatcaagggcggcggcggctctggaggaggaggaagcggaggaggaggatcccaggtgcagctgcagcagagcggaccaggactggtgaagccctcccagaccctgtctctgacatgtgccatcagcggcgattccgtgagctccaacagcgccgcctggaattggatccggcagtctcccagcagaggactggagtggctgggaaggacctactatcgctccaagtggtacaacgattatgccgtgtctgtgaagagccggatcaccatcaaccctgacacatctaagaatcagttcagcctgcagctgaattccgtgaccccagaggacacagccgtgtactattgtgcaagggaggtgaccggcgacctggaggatgcctttgacatctggggccagggcaccatggtgacagtgtctagcaccacgacgccagcgccgcgaccaccaacaccggcgcccaccatcgcgtcgcagcccctgtccctgcgcccagaggcgtgccggccagcggcggggggcgcagtgcacacgagggggctggacttcgcctgtgatatctacatctgggcgcccttggccgggacttgtggggtccttctcctgtcactggttatcaccctttactgcaaacggggcagaaagaaactcctgtatatattcaaacaaccatttatgagaccagtacaaactactcaagaggaagatggctgtagctgccgatttccagaagaagaagaaggaggatgtgaactgagagtgaagttcagcaggagcgcagacgcccccgcgtacaagcagggccagaaccagctctataacgagctcaatctaggacgaagagaggagtacgatgttttggacaagaggcgtggccgggaccctgagatggggggaaagccgagaaggaagaaccctcaggaaggcctgtacaatgaactgcagaaagataagatggcggaggcctacagtgagattgggatgaaaggcgagcgccggaggggcaaggggcacgatggcctttaccagggtctcagtacagccaccaaggacacctacgacgcccttcacatgcaggccctgccccctcgctaa

SEQ ID NO: 232 - DNA, 3536 bp, Artificial Sequence
  Synthesized
atggccttaccagtgaccgccttgctcctgccgctggccttgctgctccacgccgccaggccggacatcgtgatgacccagtccccctccagcctgacagtgacagccggcgagaaggtgacaatgatctgtaagtccagccagagcctgctgaacagcggcgaccagaagaactacctgacctggtaccagcagaagcctggccagccccccaagctgctgatcttctgggccagcacaagggagagcggcgtgcccgacagattcacaggcagcggcagcggcaccgacttcacactgaccatttcctccgtgcaggccgaggacctcgccgtgtactactgccagaacgactactcctaccccctgacattcggcgccggcaccaaactggagctgaagggtggcggtggctcgggcggtggtgggtcgggtggcggcggatctcaggtgcagctccagcagtccgatgccgagctggtgaagcccggaagcagcgtcaagatcagctgtaaggcctccggctacaccttcacagaccacgccatccactgggtgaagcagaagcccgagcagggcctggagtggatcggccactttagccccggaaacaccgacatcaagtacaacgacaagttcaagggcaaggccaccctgaccgtggacaggagcagcagcaccgcctacatgcagctgaacagcctgacaagcgaggacagcgccgtgtacttctgcaagacctccaccttcttcttcgactactggggccagggaaccaccctgacagtgtccagcaccacgacgccagcgccgcgaccaccaacaccggcgcccaccatcgcgtcgcagcccctgtccctgcgcccagaggcgtgccggccagcggcggggggcgcagtgcacacgagggggctggacttcgcctgtgatatctacatctgggcgcccttggccgggacttgtggggtccttctcctgtcactggttatcaccaaacggggcagaaagaaactcctgtatatattcaaacaaccatttatgagaccagtacaaactactcaagaggaagatggctgtagctgccgatttccagaagaagaagaaggaggatgtgaactgagagtgaagttcagcaggagcgcagacgcccccgcgtacaagcagggccagaaccagctctataacgagctcaatctaggacgaagagaggagtacgatgttttggacaagaggcgtggccgggaccctgagatggggggaaagccgagaaggaagaaccctcaggaaggcctgtacaatgaactgcagaaagataagatggcggaggcctacagtgagattgggatgaaaggcgagcgccggaggggcaaggggcacgatggcctttaccagggtctcagtacagccaccaaggacacctacgacgcccttcacatgcaggccctgccccctcgctaatctagaggcgcgcccctctccctcccccccccctaacgttactggccgaagccgcttggaataaggccggtgtgcgtttgtctatatgttattttccaccatattgccgtcttttggcaatgtgagggcccggaaacctggccctgtcttcttgacgagcattcctaggggtctttcccctctcgccaaaggaatgcaaggtctgttgaatgtcgtgaaggaagcagttcctctggaagcttcttgaagacaaacaacgtctgtagcgaccctttgcaggcagcggaaccccccacctggcgacaggtgcctctgcggccaaaagccacgtgtataagatacacctgcaaaggcggcacaaccccagtgccacgttgtgagttggatagttgtggaaagagtcaaatggctctcctcaagcgtattcaacaaggggctgaaggatgcccagaaggtaccccattgtatgggatctgatctggggcctcggtacacatgctttacatgtgtttagtcgaggttaaaaaaacgtctaggccccccgaaccacggggacgtggttttcctttgaaaaacacgatgataatatggccacaacccatatgatggccttaccagtgaccgccttgctcctgccgctggccttgctgctccacgccgccaggccggatatccagatgacccagagcccaagctccctgtccgcctctgtgggcgacagggtgaccatcacatgccgcgccagccagacaatctggtcctacctgaactggtatcagcagagacccggcaaggcccctaatctgctgatctacgcagcatctagcctgcagtctggagtgccctcccggttctctggaagaggatccggaaccgacttcaccctgacaatctcctctctgcaggccgaggacttcgccacatactattgccagcagagctattccatccctcagacctttggccagggcacaaagctggagatcaagggcggcggcggctctggaggaggaggaagcggaggaggaggatcccaggtgcagctgcagcagagcggaccaggactggtgaagccctcccagaccctgtctctgacatgtgccatcagcggcgattccgtgagctccaacagcgccgcctggaattggatccggcagtctcccagcagaggactggagtggctgggaaggacctactatcgctccaagtggtacaacgattatgccgtgtctgtgaagagccggatcaccatcaaccctgacacatctaagaatcagttcagcctgcagctgaattccgtgaccccagaggacacagccgtgtactattgtgcaagggaggtgaccggcgacctggaggatgcctttgacatctggggccagggcaccatggtgacagtgtctagcaccacgacgccagcgccgcgaccaccaacaccggcgcccaccatcgcgtcgcagcccctgtccctgcgcccagaggcgtgccggccagcggcggggggcgcagtgcacacgagggggctggacttcgcctgtgatatctacatctgggcgcccttggccgggacttgtggggtccttctcctgtcactggttatcaccctttactgcaaacggggcagaaagaaactcctgtatatattcaaacaaccatttatgagaccagtacaaactactcaagaggaagatggctgtagctgccgatttccagaagaagaagaaggaggatgtgaactgagagtgaagttcagcaggagcgcagacgcccccgcgtacaagcagggccagaaccagctctataacgagctcaatctaggacgaagagaggagtacgatgttttggacaagaggcgtggccgggaccctgagatggggggaaagccgagaaggaagaaccctcaggaaggcctgtacaatgaactgcagaaagataagatggcggaggcctacagtgagattgggatgaaaggcgagcgccggaggggcaaggggcacgatggcctttaccagggtctcagtacagccaccaaggacacctacgacgcccttcacatgcaggccctgccccctcgctaa

SEQ ID NO: 233 - DNA, 3536 bp, Artificial Sequence
  Synthesized
atggccttaccagtgaccgccttgctcctgccgctggccttgctgctccacgccgccaggccggacatcgtgatgacccagtccccctccagcctgacagtgacagccggcgagaaggtgacaatgatctgtaagtccagccagagcctgctgaacagcggcgaccagaagaactacctgacctggtaccagcagaagcctggccagccccccaagctgctgatcttctgggccagcacaagggagagcggcgtgcccgacagattcacaggcagcggcagcggcaccgacttcacactgaccatttcctccgtgcaggccgaggacctcgccgtgtactactgccagaacgactactcctaccccctgacattcggcgccggcaccaaactggagctgaagggtggcggtggctcgggcggtggtgggtcgggtggcggcggatctcaggtgcagctccagcagtccgatgccgagctggtgaagcccggaagcagcgtcaagatcagctgtaaggcctccggctacaccttcacagaccacgccatccactgggtgaagcagaagcccgagcagggcctggagtggatcggccactttagccccggaaacaccgacatcaagtacaacgacaagttcaagggcaaggccaccctgaccgtggacaggagcagcagcaccgcctacatgcagctgaacagcctgacaagcgaggacagcgccgtgtacttctgcaagacctccaccttcttcttcgactactggggccagggaaccaccctgacagtgtccagcaccacgacgccagcgccgcgaccaccaacaccggcgcccaccatcgcgtcgcagcccctgtccctgcgcccagaggcgtgccggccagcggcggggggcgcagtgcacacgagggggctggacttcgcctgtgatatctacatctgggcgcccttggccgggacttgtggggtccttctcctgtcactggttatcaccctttactgcaaacggggcagaaagaaactcctgtatatattcaaacaaccatttatgagaccagtacaaactactcaagaggaagatggctgtagctgccgatttccagaagaagaagaaggaggatgtgaactgagagtgaagttcagcaggagcgcagacgcccccgcgtacaagcagggccagaaccagctctataacgagctcaatctaggacgaagagaggagtacgatgttttggacaagaggcgtggccgggaccctgagatggggggaaagccgagaaggaagaaccctcaggaaggcctgtacaatgaactgcagaaagataagatggcggaggcctacagtgagattgggatgaaaggcgagcgccggaggggcaaggggcacgatggcctttaccagggtctcagtacagccaccaaggacacctacgacgcccttcacatgcaggccctgccccctcgctaatctagaggcgcgcccctctccctcccccccccctaacgttactggccgaagccgcttggaataaggccggtgtgcgtttgtctatatgttattttccaccatattgccgtcttttggcaatgtgagggcccggaaacctggccctgtcttcttgacgagcattcctaggggtctttcccctctcgccaaaggaatgcaaggtctgttgaatgtcgtgaaggaagcagttcctctggaagcttcttgaagacaaacaacgtctgtagcgaccctttgcaggcagcggaaccccccacctggcgacaggtgcctctgcggccaaaagccacgtgtataagatacacctgcaaaggcggcacaaccccagtgccacgttgtgagttggatagttgtggaaagagtcaaatggctctcctcaagcgtattcaacaaggggctgaaggatgcccagaaggtaccccattgtatgggatctgatctggggcctcggtacacatgctttacatgtgtttagtcgaggttaaaaaaacgtctaggccccccgaaccacggggacgtggttttcctttgaaaaacacgatgataatatggccacaacccatatgatggccttaccagtgaccgccttgctcctgccgctggccttgctgctccacgccgccaggccggatatccagatgacccagagcccaagctccctgtccgcctctgtgggcgacagggtgaccatcacatgccgcgccagccagacaatctggtcctacctgaactggtatcagcagagacccggcaaggcccctaatctgctgatctacgcagcatctagcctgcagtctggagtgccctcccggttctctggaagaggatccggaaccgacttcaccctgacaatctcctctctgcaggccgaggacttcgccacatactattgccagcagagctattccatccctcagacctttggccagggcacaaagctggagatcaagggcggcggcggctctggaggaggaggaagcggaggaggaggatcccaggtgcagctgcagcagagcggaccaggactggtgaagccctcccagaccctgtctctgacatgtgccatcagcggcgattccgtgagctccaacagcgccgcctggaattggatccggcagtctcccagcagaggactggagtggctgggaaggacctactatcgctccaagtggtacaacgattatgccgtgtctgtgaagagccggatcaccatcaaccctgacacatctaagaatcagttcagcctgcagctgaattccgtgaccccagaggacacagccgtgtactattgtgcaagggaggtgaccggcgacctggaggatgcctttgacatctggggccagggcaccatggtgacagtgtctagcaccacgacgccagcgccgcgaccaccaacaccggcgcccaccatcgcgtcgcagcccctgtccctgcgcccagaggcgtgccggccagcggcggggggcgcagtgcacacgagggggctggacttcgcctgtgatatctacatctgggcgcccttggccgggacttgtggggtccttctcctgtcactggttatcaccaaacggggcagaaagaaactcctgtatatattcaaacaaccatttatgagaccagtacaaactactcaagaggaagatggctgtagctgccgatttccagaagaagaagaaggaggatgtgaactgagagtgaagttcagcaggagcgcagacgcccccgcgtacaagcagggccagaaccagctctataacgagctcaatctaggacgaagagaggagtacgatgttttggacaagaggcgtggccgggaccctgagatggggggaaagccgagaaggaagaaccctcaggaaggcctgtacaatgaactgcagaaagataagatggcggaggcctacagtgagattgggatgaaaggcgagcgccggaggggcaaggggcacgatggcctttaccagggtctcagtacagccaccaaggacacctacgacgcccttcacatgcaggccctgccccctcgctaa

SEQ ID NO: 234 - DNA, 3527 bp, Artificial Sequence
  Synthesized
atggccttaccagtgaccgccttgctcctgccgctggccttgctgctccacgccgccaggccggacatcgtgatgacccagtccccctccagcctgacagtgacagccggcgagaaggtgacaatgatctgtaagtccagccagagcctgctgaacagcggcgaccagaagaactacctgacctggtaccagcagaagcctggccagccccccaagctgctgatcttctgggccagcacaagggagagcggcgtgcccgacagattcacaggcagcggcagcggcaccgacttcacactgaccatttcctccgtgcaggccgaggacctcgccgtgtactactgccagaacgactactcctaccccctgacattcggcgccggcaccaaactggagctgaagggtggcggtggctcgggcggtggtgggtcgggtggcggcggatctcaggtgcagctccagcagtccgatgccgagctggtgaagcccggaagcagcgtcaagatcagctgtaaggcctccggctacaccttcacagaccacgccatccactgggtgaagcagaagcccgagcagggcctggagtggatcggccactttagccccggaaacaccgacatcaagtacaacgacaagttcaagggcaaggccaccctgaccgtggacaggagcagcagcaccgcctacatgcagctgaacagcctgacaagcgaggacagcgccgtgtacttctgcaagacctccaccttcttcttcgactactggggccagggaaccaccctgacagtgtccagcaccacgacgccagcgccgcgaccaccaacaccggcgcccaccatcgcgtcgcagcccctgtccctgcgcccagaggcgtgccggccagcggcggggggcgcagtgcacacgagggggctggacttcgcctgtgatatctacatctgggcgcccttggccgggacttgtggggtccttctcctgtcactggttatcaccaaacggggcagaaagaaactcctgtatatattcaaacaaccatttatgagaccagtacaaactactcaagaggaagatggctgtagctgccgatttccagaagaagaagaaggaggatgtgaactgagagtgaagttcagcaggagcgcagacgcccccgcgtacaagcagggccagaaccagctctataacgagctcaatctaggacgaagagaggagtacgatgttttggacaagaggcgtggccgggaccctgagatggggggaaagccgagaaggaagaaccctcaggaaggcctgtacaatgaactgcagaaagataagatggcggaggcctacagtgagattgggatgaaaggcgagcgccggaggggcaaggggcacgatggcctttaccagggtctcagtacagccaccaaggacacctacgacgcccttcacatgcaggccctgccccctcgctaatctagaggcgcgcccctctccctcccccccccctaacgttactggccgaagccgcttggaataaggccggtgtgcgtttgtctatatgttattttccaccatattgccgtcttttggcaatgtgagggcccggaaacctggccctgtcttcttgacgagcattcctaggggtctttcccctctcgccaaaggaatgcaaggtctgttgaatgtcgtgaaggaagcagttcctctggaagcttcttgaagacaaacaacgtctgtagcgaccctttgcaggcagcggaaccccccacctggcgacaggtgcctctgcggccaaaagccacgtgtataagatacacctgcaaaggcggcacaaccccagtgccacgttgtgagttggatagttgtggaaagagtcaaatggctctcctcaagcgtattcaacaaggggctgaaggatgcccagaaggtaccccattgtatgggatctgatctggggcctcggtacacatgctttacatgtgtttagtcgaggttaaaaaaacgtctaggccccccgaaccacggggacgtggttttcctttgaaaaacacgatgataatatggccacaacccatatgatggccttaccagtgaccgccttgctcctgccgctggccttgctgctccacgccgccaggccggatatccagatgacccagagcccaagctccctgtccgcctctgtgggcgacagggtgaccatcacatgccgcgccagccagacaatctggtcctacctgaactggtatcagcagagacccggcaaggcccctaatctgctgatctacgcagcatctagcctgcagtctggagtgccctcccggttctctggaagaggatccggaaccgacttcaccctgacaatctcctctctgcaggccgaggacttcgccacatactattgccagcagagctattccatccctcagacctttggccagggcacaaagctggagatcaagggcggcggcggctctggaggaggaggaagcggaggaggaggatcccaggtgcagctgcagcagagcggaccaggactggtgaagccctcccagaccctgtctctgacatgtgccatcagcggcgattccgtgagctccaacagcgccgcctggaattggatccggcagtctcccagcagaggactggagtggctgggaaggacctactatcgctccaagtggtacaacgattatgccgtgtctgtgaagagccggatcaccatcaaccctgacacatctaagaatcagttcagcctgcagctgaattccgtgaccccagaggacacagccgtgtactattgtgcaagggaggtgaccggcgacctggaggatgcctttgacatctggggccagggcaccatggtgacagtgtctagcaccacgacgccagcgccgcgaccaccaacaccggcgcccaccatcgcgtcgcagcccctgtccctgcgcccagaggcgtgccggccagcggcggggggcgcagtgcacacgagggggctggacttcgcctgtgatatctacatctgggcgcccttggccgggacttgtggggtccttctcctgtcactggttatcaccaaacggggcagaaagaaactcctgtatatattcaaacaaccatttatgagaccagtacaaactactcaagaggaagatggctgtagctgccgatttccagaagaagaagaaggaggatgtgaactgagagtgaagttcagcaggagcgcagacgcccccgcgtacaagcagggccagaaccagctctataacgagctcaatctaggacgaagagaggagtacgatgttttggacaagaggcgtggccgggaccctgagatggggggaaagccgagaaggaagaaccctcaggaaggcctgtacaatgaactgcagaaagataagatggcggaggcctacagtgagattgggatgaaaggcgagcgccggaggggcaaggggcacgatggcctttaccagggtctcagtacagccaccaaggacacctacgacgcccttcacatgcaggccctgccccctcgctaa

SEQ ID NO: 235 - DNA, 3665 bp, Artificial Sequence
  Synthesized
atggccttaccagtgaccgccttgctcctgccgctggccttgctgctccacgccgccaggccggatattgtgatgacccagtccccgtcctccctgaccgtgaccgcgggcgaaaaagtgaccatgatttgcaaatcctcccagtccctgctgaattccggcgatcagaaaaattatctgacctggtatcagcagaaaccgggccagccgccgaaactgctgattttttgggcgtccacccgtgaatccggcgtgccggatcgttttaccggctccggctccggcaccgattttaccctgaccatttcctccgtgcaggcggaagatctggcggtgtattattgccagaatgattattcctatccgctgacctttggcgcgggcaccaaactggaactgaaaggcggcggcggctccggcggcggcggctccggcggcggcggctcccaggtgcagctgcagcagtccgatgcggaactggtgaaaccgggctcctccgtgaaaatttcctgcaaagcgtccggctatacctttaccgatcatgcgattcattgggtgaaacagaaaccggaacagggcctggaatggattggccatttttccccgggcaataccgatattaaatataatgataaatttaaaggcaaagcgaccctgaccgtggatcgttcctcctccaccgcgtatatgcagctgaattccctgacctccgaagattccgcggtgtatttttgcaaaacctccacctttttttttgattattggggccagggcaccaccctgaccgtgtcctccaccacgacgccagcgccgcgaccaccaacaccggcgcccaccatcgcgtcgcagcccctgtccctgcgcccagaggcgtgccggccagcggcggggggcgcagtgcacacgagggggctggacttcgcctgtgatatctacatctgggcgcccttggccgggacttgtggggtccttctcctgtcactggttatcaccctttactgcaaacggggcagaaagaaactcctgtatatattcaaacaaccatttatgagaccagtacaaactactcaagaggaagatggctgtagctgccgatttccagaagaagaagaaggaggatgtgaactgagagtgaagttcagcaggagcgcagacgcccccgcgtacaagcagggccagaaccagctctataacgagctcaatctaggacgaagagaggagtacgatgttttggacaagaggcgtggccgggaccctgagatggggggaaagccgagaaggaagaaccctcaggaaggcctgtacaatgaactgcagaaagataagatggcggaggcctacagtgagattgggatgaaaggcgagcgccggaggggcaaggggcacgatggcctttaccagggtctcagtacagccaccaaggacacctacgacgcccttcacatgcaggccctgccccctcgctaatctagaggcgcgcccctctccctcccccccccctaacgttactggccgaagccgcttggaataaggccggtgtgcgtttgtctatatgttattttccaccatattgccgtcttttggcaatgtgagggcccggaaacctggccctgtcttcttgacgagcattcctaggggtctttcccctctcgccaaaggaatgcaaggtctgttgaatgtcgtgaaggaagcagttcctctggaagcttcttgaagacaaacaacgtctgtagcgaccctttgcaggcagcggaaccccccacctggcgacaggtgcctctgcggccaaaagccacgtgtataagatacacctgcaaaggcggcacaaccccagtgccacgttgtgagttggatagttgtggaaagagtcaaatggctctcctcaagcgtattcaacaaggggctgaaggatgcccagaaggtaccccattgtatgggatctgatctggggcctcggtacacatgctttacatgtgtttagtcgaggttaaaaaaacgtctaggccccccgaaccacggggacgtggttttcctttgaaaaacacgatgataatatggccacaacccatatgatggccttaccagtgaccgccttgctcctgccgctggccttgctgctccacgccgccaggccgatgggctggtcctgcatcatcctgttcctggtggccaccgccaccggcgtgcactccaacatcgtgctgacccagtcccccgcctccctggccgtgtccctgggccagcgggccaccatctcctgccgggcctccgagtccgtggactcctacggcaactccttcatgcactggtaccagcagaagcccggccagccccccaagctgctgatctacctggcctccaacctggagtccggcgtgcccgcccggttctccggctccggctcccggaccgacttcaccctgaccatcgaccccgtggaggccgacgacgtggccacctactactgccagcagaacaacggcgacccctacaccttcggcggcggcaccaagctggagatcatccggggcggcggcggctccggcggcggcggctccggcggcggcggctccatgggctggtcctgcatcatcctgttcctggtggccaccgccaccggcgtgcactccgaggtgcagctggtggagtccggcggcggcctgatgcagcccaagggctccctgaagctgtcctgcgccgcctccggcttcaccttcaagacctacgccctgaactgggtgcggcaggcccccggcaccggcctggagtgggtggcccggatccggtccaagtccaacaactacaccacctactacgccgactccgtgaaggaccggttcaccatctcccgggacgactcccagaacatgctgtacctgcagatgaacaacctgaagaccgaggacaccgccatgtactactgcgtgcggccccagtccggcacctccttcgcctactggggccagggcaccctggtgaccgtgtccgccgccaccacgacgccagcgccgcgaccaccaacaccggcgcccaccatcgcgtcgcagcccctgtccctgcgcccagaggcgtgccggccagcggcggggggcgcagtgcacacgagggggctggacttcgcctgtgatatctacatctgggcgcccttggccgggacttgtggggtccttctcctgtcactggttatcaccctttactgcaaacggggcagaaagaaactcctgtatatattcaaacaaccatttatgagaccagtacaaactactcaagaggaagatggctgtagctgccgatttccagaagaagaagaaggaggatgtgaactgagagtgaagttcagcaggagcgcagacgcccccgcgtacaagcagggccagaaccagctctataacgagctcaatctaggacgaagagaggagtacgatgttttggacaagaggcgtggccgggaccctgagatggggggaaagccgagaaggaagaaccctcaggaaggcctgtacaatgaactgcagaaagataagatggcggaggcctacagtgagattgggatgaaaggcgagcgccggaggggcaaggggcacgatggcctttaccagggtctcagtacagccaccaaggacacctacgacgcccttcacatgcaggccctgccccctcgctaa

SEQ ID NO: 236 - protein, 530 aa, Artificial Sequence
  Synthesized
MALPVTALLLPLALLLHAARPMGWSCIILFLVATATGVHSNIVLTQSPASLAVSLGQRATISCRASESVDSYGNSFMHWYQQKPGQPPKLLIYLASNLESGVPARFSGSGSRTDFTLTIDPVEADDVATYYCQQNNGDPYTFGGGTKLEIIRGGGGSGGGGSGGGGSMGWSCIILFLVATATGVHSEVQLVESGGGLMQPKGSLKLSCAASGFTFKTYALNWVRQAPGTGLEWVARIRSKSNNYTTYYADSVKDRFTISRDDSQNMLYLQMNNLKTEDTAMYYCVRPQSGTSFAYWGQGTLVTVSAATTTPAPRPPTPAPTIASQPLSLRPEACRPAAGGAVHTRGLDFACDIYIWAPLAGTCGVLLLSLVITLYCKRGRKKLLYIFKQPFMRPVQTTQEEDGCSCRFPEEEEGGCELRVKFSRSADAPAYQQGQNQLYNELNLGRREEYDVLDKRRGRDPEMGGKPRRKNPQEGLYNELQKDKMAEAYSEIGMKGERRRGKGHDGLYQGLSTATKDTYDALHMQALPPR

SEQ ID NO: 237 - DNA, 3656 bp, Artificial Sequence
  Synthesized
atggccttaccagtgaccgccttgctcctgccgctggccttgctgctccacgccgccaggccggatattgtgatgacccagtccccgtcctccctgaccgtgaccgcgggcgaaaaagtgaccatgatttgcaaatcctcccagtccctgctgaattccggcgatcagaaaaattatctgacctggtatcagcagaaaccgggccagccgccgaaactgctgattttttgggcgtccacccgtgaatccggcgtgccggatcgttttaccggctccggctccggcaccgattttaccctgaccatttcctccgtgcaggcggaagatctggcggtgtattattgccagaatgattattcctatccgctgacctttggcgcgggcaccaaactggaactgaaaggcggcggcggctccggcggcggcggctccggcggcggcggctcccaggtgcagctgcagcagtccgatgcggaactggtgaaaccgggctcctccgtgaaaatttcctgcaaagcgtccggctatacctttaccgatcatgcgattcattgggtgaaacagaaaccggaacagggcctggaatggattggccatttttccccgggcaataccgatattaaatataatgataaatttaaaggcaaagcgaccctgaccgtggatcgttcctcctccaccgcgtatatgcagctgaattccctgacctccgaagattccgcggtgtatttttgcaaaacctccacctttttttttgattattggggccagggcaccaccctgaccgtgtcctccaccacgacgccagcgccgcgaccaccaacaccggcgcccaccatcgcgtcgcagcccctgtccctgcgcccagaggcgtgccggccagcggcggggggcgcagtgcacacgagggggctggacttcgcctgtgatatctacatctgggcgcccttggccgggacttgtggggtccttctcctgtcactggttatcaccaaacggggcagaaagaaactcctgtatatattcaaacaaccatttatgagaccagtacaaactactcaagaggaagatggctgtagctgccgatttccagaagaagaagaaggaggatgtgaactgagagtgaagttcagcaggagcgcagacgcccccgcgtacaagcagggccagaaccagctctataacgagctcaatctaggacgaagagaggagtacgatgttttggacaagaggcgtggccgggaccctgagatggggggaaagccgagaaggaagaaccctcaggaaggcctgtacaatgaactgcagaaagataagatggcggaggcctacagtgagattgggatgaaaggcgagcgccggaggggcaaggggcacgatggcctttaccagggtctcagtacagccaccaaggacacctacgacgcccttcacatgcaggccctgccccctcgctaatctagaggcgcgcccctctccctcccccccccctaacgttactggccgaagccgcttggaataaggccggtgtgcgtttgtctatatgttattttccaccatattgccgtcttttggcaatgtgagggcccggaaacctggccctgtcttcttgacgagcattcctaggggtctttcccctctcgccaaaggaatgcaaggtctgttgaatgtcgtgaaggaagcagttcctctggaagcttcttgaagacaaacaacgtctgtagcgaccctttgcaggcagcggaaccccccacctggcgacaggtgcctctgcggccaaaagccacgtgtataagatacacctgcaaaggcggcacaaccccagtgccacgttgtgagttggatagttgtggaaagagtcaaatggctctcctcaagcgtattcaacaaggggctgaaggatgcccagaaggtaccccattgtatgggatctgatctggggcctcggtacacatgctttacatgtgtttagtcgaggttaaaaaaacgtctaggccccccgaaccacggggacgtggttttcctttgaaaaacacgatgataatatggccacaacccatatgatggccttaccagtgaccgccttgctcctgccgctggccttgctgctccacgccgccaggccgatgggctggtcctgcatcatcctgttcctggtggccaccgccaccggcgtgcactccaacatcgtgctgacccagtcccccgcctccctggccgtgtccctgggccagcgggccaccatctcctgccgggcctccgagtccgtggactcctacggcaactccttcatgcactggtaccagcagaagcccggccagccccccaagctgctgatctacctggcctccaacctggagtccggcgtgcccgcccggttctccggctccggctcccggaccgacttcaccctgaccatcgaccccgtggaggccgacgacgtggccacctactactgccagcagaacaacggcgacccctacaccttcggcggcggcaccaagctggagatcatccggggcggcggcggctccggcggcggcggctccggcggcggcggctccatgggctggtcctgcatcatcctgttcctggtggccaccgccaccggcgtgcactccgaggtgcagctggtggagtccggcggcggcctgatgcagcccaagggctccctgaagctgtcctgcgccgcctccggcttcaccttcaagacctacgccctgaactgggtgcggcaggcccccggcaccggcctggagtgggtggcccggatccggtccaagtccaacaactacaccacctactacgccgactccgtgaaggaccggttcaccatctcccgggacgactcccagaacatgctgtacctgcagatgaacaacctgaagaccgaggacaccgccatgtactactgcgtgcggccccagtccggcacctccttcgcctactggggccagggcaccctggtgaccgtgtccgccgccaccacgacgccagcgccgcgaccaccaacaccggcgcccaccatcgcgtcgcagcccctgtccctgcgcccagaggcgtgccggccagcggcggggggcgcagtgcacacgagggggctggacttcgcctgtgatatctacatctgggcgcccttggccgggacttgtggggtccttctcctgtcactggttatcaccctttactgcaaacggggcagaaagaaactcctgtatatattcaaacaaccatttatgagaccagtacaaactactcaagaggaagatggctgtagctgccgatttccagaagaagaagaaggaggatgtgaactgagagtgaagttcagcaggagcgcagacgcccccgcgtacaagcagggccagaaccagctctataacgagctcaatctaggacgaagagaggagtacgatgttttggacaagaggcgtggccgggaccctgagatggggggaaagccgagaaggaagaaccctcaggaaggcctgtacaatgaactgcagaaagataagatggcggaggcctacagtgagattgggatgaaaggcgagcgccggaggggcaaggggcacgatggcctttaccagggtctcagtacagccaccaaggacacctacgacgcccttcacatgcaggccctgccccctcgctaa

SEQ ID NO: 238 - DNA, 3656 bp, Artificial Sequence
  Synthesized
atggccttaccagtgaccgccttgctcctgccgctggccttgctgctccacgccgccaggccggatattgtgatgacccagtccccgtcctccctgaccgtgaccgcgggcgaaaaagtgaccatgatttgcaaatcctcccagtccctgctgaattccggcgatcagaaaaattatctgacctggtatcagcagaaaccgggccagccgccgaaactgctgattttttgggcgtccacccgtgaatccggcgtgccggatcgttttaccggctccggctccggcaccgattttaccctgaccatttcctccgtgcaggcggaagatctggcggtgtattattgccagaatgattattcctatccgctgacctttggcgcgggcaccaaactggaactgaaaggcggcggcggctccggcggcggcggctccggcggcggcggctcccaggtgcagctgcagcagtccgatgcggaactggtgaaaccgggctcctccgtgaaaatttcctgcaaagcgtccggctatacctttaccgatcatgcgattcattgggtgaaacagaaaccggaacagggcctggaatggattggccatttttccccgggcaataccgatattaaatataatgataaatttaaaggcaaagcgaccctgaccgtggatcgttcctcctccaccgcgtatatgcagctgaattccctgacctccgaagattccgcggtgtatttttgcaaaacctccacctttttttttgattattggggccagggcaccaccctgaccgtgtcctccaccacgacgccagcgccgcgaccaccaacaccggcgcccaccatcgcgtcgcagcccctgtccctgcgcccagaggcgtgccggccagcggcggggggcgcagtgcacacgagggggctggacttcgcctgtgatatctacatctgggcgcccttggccgggacttgtggggtccttctcctgtcactggttatcaccctttactgcaaacggggcagaaagaaactcctgtatatattcaaacaaccatttatgagaccagtacaaactactcaagaggaagatggctgtagctgccgatttccagaagaagaagaaggaggatgtgaactgagagtgaagttcagcaggagcgcagacgcccccgcgtacaagcagggccagaaccagctctataacgagctcaatctaggacgaagagaggagtacgatgttttggacaagaggcgtggccgggaccctgagatggggggaaagccgagaaggaagaaccctcaggaaggcctgtacaatgaactgcagaaagataagatggcggaggcctacagtgagattgggatgaaaggcgagcgccggaggggcaaggggcacgatggcctttaccagggtctcagtacagccaccaaggacacctacgacgcccttcacatgcaggccctgccccctcgctaatctagaggcgcgcccctctccctcccccccccctaacgttactggccgaagccgcttggaataaggccggtgtgcgtttgtctatatgttattttccaccatattgccgtcttttggcaatgtgagggcccggaaacctggccctgtcttcttgacgagcattcctaggggtctttcccctctcgccaaaggaatgcaaggtctgttgaatgtcgtgaaggaagcagttcctctggaagcttcttgaagacaaacaacgtctgtagcgaccctttgcaggcagcggaaccccccacctggcgacaggtgcctctgcggccaaaagccacgtgtataagatacacctgcaaaggcggcacaaccccagtgccacgttgtgagttggatagttgtggaaagagtcaaatggctctcctcaagcgtattcaacaaggggctgaaggatgcccagaaggtaccccattgtatgggatctgatctggggcctcggtacacatgctttacatgtgtttagtcgaggttaaaaaaacgtctaggccccccgaaccacggggacgtggttttcctttgaaaaacacgatgataatatggccacaacccatatgatggccttaccagtgaccgccttgctcctgccgctggccttgctgctccacgccgccaggccgatgggctggtcctgcatcatcctgttcctggtggccaccgccaccggcgtgcactccaacatcgtgctgacccagtcccccgcctccctggccgtgtccctgggccagcgggccaccatctcctgccgggcctccgagtccgtggactcctacggcaactccttcatgcactggtaccagcagaagcccggccagccccccaagctgctgatctacctggcctccaacctggagtccggcgtgcccgcccggttctccggctccggctcccggaccgacttcaccctgaccatcgaccccgtggaggccgacgacgtggccacctactactgccagcagaacaacggcgacccctacaccttcggcggcggcaccaagctggagatcatccggggcggcggcggctccggcggcggcggctccggcggcggcggctccatgggctggtcctgcatcatcctgttcctggtggccaccgccaccggcgtgcactccgaggtgcagctggtggagtccggcggcggcctgatgcagcccaagggctccctgaagctgtcctgcgccgcctccggcttcaccttcaagacctacgccctgaactgggtgcggcaggcccccggcaccggcctggagtgggtggcccggatccggtccaagtccaacaactacaccacctactacgccgactccgtgaaggaccggttcaccatctcccgggacgactcccagaacatgctgtacctgcagatgaacaacctgaagaccgaggacaccgccatgtactactgcgtgcggccccagtccggcacctccttcgcctactggggccagggcaccctggtgaccgtgtccgccgccaccacgacgccagcgccgcgaccaccaacaccggcgcccaccatcgcgtcgcagcccctgtccctgcgcccagaggcgtgccggccagcggcggggggcgcagtgcacacgagggggctggacttcgcctgtgatatctacatctgggcgcccttggccgggacttgtggggtccttctcctgtcactggttatcaccaaacggggcagaaagaaactcctgtatatattcaaacaaccatttatgagaccagtacaaactactcaagaggaagatggctgtagctgccgatttccagaagaagaagaaggaggatgtgaactgagagtgaagttcagcaggagcgcagacgcccccgcgtacaagcagggccagaaccagctctataacgagctcaatctaggacgaagagaggagtacgatgttttggacaagaggcgtggccgggaccctgagatggggggaaagccgagaaggaagaaccctcaggaaggcctgtacaatgaactgcagaaagataagatggcggaggcctacagtgagattgggatgaaaggcgagcgccggaggggcaaggggcacgatggcctttaccagggtctcagtacagccaccaaggacacctacgacgcccttcacatgcaggccctgccccctcgctaa

SEQ ID NO: 239 - protein, 527 aa, Artificial Sequence
  Synthesized
MALPVTALLLPLALLLHAARPMGWSCIILFLVATATGVHSNIVLTQSPASLAVSLGQRATISCRASESVDSYGNSFMHWYQQKPGQPPKLLIYLASNLESGVPARFSGSGSRTDFTLTIDPVEADDVATYYCQQNNGDPYTFGGGTKLEIIRGGGGSGGGGSGGGGSMGWSCIILFLVATATGVHSEVQLVESGGGLMQPKGSLKLSCAASGFTFKTYALNWVRQAPGTGLEWVARIRSKSNNYTTYYADSVKDRFTISRDDSQNMLYLQMNNLKTEDTAMYYCVRPQSGTSFAYWGQGTLVTVSAATTTPAPRPPTPAPTIASQPLSLRPEACRPAAGGAVHTRGLDFACDIYIWAPLAGTCGVLLLSLVITKRGRKKLLYIFKQPFMRPVQTTQEEDGCSCRFPEEEEGGCELRVKFSRSADAPAYQQGQNQLYNELNLGRREEYDVLDKRRGRDPEMGGKPRRKNPQEGLYNELQKDKMAEAYSEIGMKGERRRGKGHDGLYQGLSTATKDTYDALHMQALPPR

SEQ ID NO: 240 - DNA, 3665 bp, Artificial Sequence
  Synthesized
atggccttaccagtgaccgccttgctcctgccgctggccttgctgctccacgccgccaggccggacatcgtgatgacccagtccccctccagcctgacagtgacagccggcgagaaggtgacaatgatctgtaagtccagccagagcctgctgaacagcggcgaccagaagaactacctgacctggtaccagcagaagcctggccagccccccaagctgctgatcttctgggccagcacaagggagagcggcgtgcccgacagattcacaggcagcggcagcggcaccgacttcacactgaccatttcctccgtgcaggccgaggacctcgccgtgtactactgccagaacgactactcctaccccctgacattcggcgccggcaccaaactggagctgaagggtggcggtggctcgggcggtggtgggtcgggtggcggcggatctcaggtgcagctccagcagtccgatgccgagctggtgaagcccggaagcagcgtcaagatcagctgtaaggcctccggctacaccttcacagaccacgccatccactgggtgaagcagaagcccgagcagggcctggagtggatcggccactttagccccggaaacaccgacatcaagtacaacgacaagttcaagggcaaggccaccctgaccgtggacaggagcagcagcaccgcctacatgcagctgaacagcctgacaagcgaggacagcgccgtgtacttctgcaagacctccaccttcttcttcgactactggggccagggaaccaccctgacagtgtccagcaccacgacgccagcgccgcgaccaccaacaccggcgcccaccatcgcgtcgcagcccctgtccctgcgcccagaggcgtgccggccagcggcggggggcgcagtgcacacgagggggctggacttcgcctgtgatatctacatctgggcgcccttggccgggacttgtggggtccttctcctgtcactggttatcaccctttactgcaaacggggcagaaagaaactcctgtatatattcaaacaaccatttatgagaccagtacaaactactcaagaggaagatggctgtagctgccgatttccagaagaagaagaaggaggatgtgaactgagagtgaagttcagcaggagcgcagacgcccccgcgtacaagcagggccagaaccagctctataacgagctcaatctaggacgaagagaggagtacgatgttttggacaagaggcgtggccgggaccctgagatggggggaaagccgagaaggaagaaccctcaggaaggcctgtacaatgaactgcagaaagataagatggcggaggcctacagtgagattgggatgaaaggcgagcgccggaggggcaaggggcacgatggcctttaccagggtctcagtacagccaccaaggacacctacgacgcccttcacatgcaggccctgccccctcgctaatctagaggcgcgcccctctccctcccccccccctaacgttactggccgaagccgcttggaataaggccggtgtgcgtttgtctatatgttattttccaccatattgccgtcttttggcaatgtgagggcccggaaacctggccctgtcttcttgacgagcattcctaggggtctttcccctctcgccaaaggaatgcaaggtctgttgaatgtcgtgaaggaagcagttcctctggaagcttcttgaagacaaacaacgtctgtagcgaccctttgcaggcagcggaaccccccacctggcgacaggtgcctctgcggccaaaagccacgtgtataagatacacctgcaaaggcggcacaaccccagtgccacgttgtgagttggatagttgtggaaagagtcaaatggctctcctcaagcgtattcaacaaggggctgaaggatgcccagaaggtaccccattgtatgggatctgatctggggcctcggtacacatgctttacatgtgtttagtcgaggttaaaaaaacgtctaggccccccgaaccacggggacgtggttttcctttgaaaaacacgatgataatatggccacaacccatatgatggccttaccagtgaccgccttgctcctgccgctggccttgctgctccacgccgccaggccgatgggctggtcctgcatcatcctgttcctggtggccaccgccaccggcgtgcactccaacatcgtgctgacccagtcccccgcctccctggccgtgtccctgggccagcgggccaccatctcctgccgggcctccgagtccgtggactcctacggcaactccttcatgcactggtaccagcagaagcccggccagccccccaagctgctgatctacctggcctccaacctggagtccggcgtgcccgcccggttctccggctccggctcccggaccgacttcaccctgaccatcgaccccgtggaggccgacgacgtggccacctactactgccagcagaacaacggcgacccctacaccttcggcggcggcaccaagctggagatcatccggggcggcggcggctccggcggcggcggctccggcggcggcggctccatgggctggtcctgcatcatcctgttcctggtggccaccgccaccggcgtgcactccgaggtgcagctggtggagtccggcggcggcctgatgcagcccaagggctccctgaagctgtcctgcgccgcctccggcttcaccttcaagacctacgccctgaactgggtgcggcaggcccccggcaccggcctggagtgggtggcccggatccggtccaagtccaacaactacaccacctactacgccgactccgtgaaggaccggttcaccatctcccgggacgactcccagaacatgctgtacctgcagatgaacaacctgaagaccgaggacaccgccatgtactactgcgtgcggccccagtccggcacctccttcgcctactggggccagggcaccctggtgaccgtgtccgccgccaccacgacgccagcgccgcgaccaccaacaccggcgcccaccatcgcgtcgcagcccctgtccctgcgcccagaggcgtgccggccagcggcggggggcgcagtgcacacgagggggctggacttcgcctgtgatatctacatctgggcgcccttggccgggacttgtggggtccttctcctgtcactggttatcaccctttactgcaaacggggcagaaagaaactcctgtatatattcaaacaaccatttatgagaccagtacaaactactcaagaggaagatggctgtagctgccgatttccagaagaagaagaaggaggatgtgaactgagagtgaagttcagcaggagcgcagacgcccccgcgtacaagcagggccagaaccagctctataacgagctcaatctaggacgaagagaggagtacgatgttttggacaagaggcgtggccgggaccctgagatggggggaaagccgagaaggaagaaccctcaggaaggcctgtacaatgaactgcagaaagataagatggcggaggcctacagtgagattgggatgaaaggcgagcgccggaggggcaaggggcacgatggcctttaccagggtctcagtacagccaccaaggacacctacgacgcccttcacatgcaggccctgccccctcgctaa

SEQ ID NO: 241 - DNA, 3656 bp, Artificial Sequence
  Synthesized
atggccttaccagtgaccgccttgctcctgccgctggccttgctgctccacgccgccaggccggacatcgtgatgacccagtccccctccagcctgacagtgacagccggcgagaaggtgacaatgatctgtaagtccagccagagcctgctgaacagcggcgaccagaagaactacctgacctggtaccagcagaagcctggccagccccccaagctgctgatcttctgggccagcacaagggagagcggcgtgcccgacagattcacaggcagcggcagcggcaccgacttcacactgaccatttcctccgtgcaggccgaggacctcgccgtgtactactgccagaacgactactcctaccccctgacattcggcgccggcaccaaactggagctgaagggtggcggtggctcgggcggtggtgggtcgggtggcggcggatctcaggtgcagctccagcagtccgatgccgagctggtgaagcccggaagcagcgtcaagatcagctgtaaggcctccggctacaccttcacagaccacgccatccactgggtgaagcagaagcccgagcagggcctggagtggatcggccactttagccccggaaacaccgacatcaagtacaacgacaagttcaagggcaaggccaccctgaccgtggacaggagcagcagcaccgcctacatgcagctgaacagcctgacaagcgaggacagcgccgtgtacttctgcaagacctccaccttcttcttcgactactggggccagggaaccaccctgacagtgtccagcaccacgacgccagcgccgcgaccaccaacaccggcgcccaccatcgcgtcgcagcccctgtccctgcgcccagaggcgtgccggccagcggcggggggcgcagtgcacacgagggggctggacttcgcctgtgatatctacatctgggcgcccttggccgggacttgtggggtccttctcctgtcactggttatcaccaaacggggcagaaagaaactcctgtatatattcaaacaaccatttatgagaccagtacaaactactcaagaggaagatggctgtagctgccgatttccagaagaagaagaaggaggatgtgaactgagagtgaagttcagcaggagcgcagacgcccccgcgtacaagcagggccagaaccagctctataacgagctcaatctaggacgaagagaggagtacgatgttttggacaagaggcgtggccgggaccctgagatggggggaaagccgagaaggaagaaccctcaggaaggcctgtacaatgaactgcagaaagataagatggcggaggcctacagtgagattgggatgaaaggcgagcgccggaggggcaaggggcacgatggcctttaccagggtctcagtacagccaccaaggacacctacgacgcccttcacatgcaggccctgccccctcgctaatctagaggcgcgcccctctccctcccccccccctaacgttactggccgaagccgcttggaataaggccggtgtgcgtttgtctatatgttattttccaccatattgccgtcttttggcaatgtgagggcccggaaacctggccctgtcttcttgacgagcattcctaggggtctttcccctctcgccaaaggaatgcaaggtctgttgaatgtcgtgaaggaagcagttcctctggaagcttcttgaagacaaacaacgtctgtagcgaccctttgcaggcagcggaaccccccacctggcgacaggtgcctctgcggccaaaagccacgtgtataagatacacctgcaaaggcggcacaaccccagtgccacgttgtgagttggatagttgtggaaagagtcaaatggctctcctcaagcgtattcaacaaggggctgaaggatgcccagaaggtaccccattgtatgggatctgatctggggcctcggtacacatgctttacatgtgtttagtcgaggttaaaaaaacgtctaggccccccgaaccacggggacgtggttttcctttgaaaaacacgatgataatatggccacaacccatatgatggccttaccagtgaccgccttgctcctgccgctggccttgctgctccacgccgccaggccgatgggctggtcctgcatcatcctgttcctggtggccaccgccaccggcgtgcactccaacatcgtgctgacccagtcccccgcctccctggccgtgtccctgggccagcgggccaccatctcctgccgggcctccgagtccgtggactcctacggcaactccttcatgcactggtaccagcagaagcccggccagccccccaagctgctgatctacctggcctccaacctggagtccggcgtgcccgcccggttctccggctccggctcccggaccgacttcaccctgaccatcgaccccgtggaggccgacgacgtggccacctactactgccagcagaacaacggcgacccctacaccttcggcggcggcaccaagctggagatcatccggggcggcggcggctccggcggcggcggctccggcggcggcggctccatgggctggtcctgcatcatcctgttcctggtggccaccgccaccggcgtgcactccgaggtgcagctggtggagtccggcggcggcctgatgcagcccaagggctccctgaagctgtcctgcgccgcctccggcttcaccttcaagacctacgccctgaactgggtgcggcaggcccccggcaccggcctggagtgggtggcccggatccggtccaagtccaacaactacaccacctactacgccgactccgtgaaggaccggttcaccatctcccgggacgactcccagaacatgctgtacctgcagatgaacaacctgaagaccgaggacaccgccatgtactactgcgtgcggccccagtccggcacctccttcgcctactggggccagggcaccctggtgaccgtgtccgccgccaccacgacgccagcgccgcgaccaccaacaccggcgcccaccatcgcgtcgcagcccctgtccctgcgcccagaggcgtgccggccagcggcggggggcgcagtgcacacgagggggctggacttcgcctgtgatatctacatctgggcgcccttggccgggacttgtggggtccttctcctgtcactggttatcaccctttactgcaaacggggcagaaagaaactcctgtatatattcaaacaaccatttatgagaccagtacaaactactcaagaggaagatggctgtagctgccgatttccagaagaagaagaaggaggatgtgaactgagagtgaagttcagcaggagcgcagacgcccccgcgtacaagcagggccagaaccagctctataacgagctcaatctaggacgaagagaggagtacgatgttttggacaagaggcgtggccgggaccctgagatggggggaaagccgagaaggaagaaccctcaggaaggcctgtacaatgaactgcagaaagataagatggcggaggcctacagtgagattgggatgaaaggcgagcgccggaggggcaaggggcacgatggcctttaccagggtctcagtacagccaccaaggacacctacgacgcccttcacatgcaggccctgccccctcgctaa

SEQ ID NO: 242 - DNA, 3656 bp, Artificial Sequence
  Synthesized
atggccttaccagtgaccgccttgctcctgccgctggccttgctgctccacgccgccaggccggacatcgtgatgacccagtccccctccagcctgacagtgacagccggcgagaaggtgacaatgatctgtaagtccagccagagcctgctgaacagcggcgaccagaagaactacctgacctggtaccagcagaagcctggccagccccccaagctgctgatcttctgggccagcacaagggagagcggcgtgcccgacagattcacaggcagcggcagcggcaccgacttcacactgaccatttcctccgtgcaggccgaggacctcgccgtgtactactgccagaacgactactcctaccccctgacattcggcgccggcaccaaactggagctgaagggtggcggtggctcgggcggtggtgggtcgggtggcggcggatctcaggtgcagctccagcagtccgatgccgagctggtgaagcccggaagcagcgtcaagatcagctgtaaggcctccggctacaccttcacagaccacgccatccactgggtgaagcagaagcccgagcagggcctggagtggatcggccactttagccccggaaacaccgacatcaagtacaacgacaagttcaagggcaaggccaccctgaccgtggacaggagcagcagcaccgcctacatgcagctgaacagcctgacaagcgaggacagcgccgtgtacttctgcaagacctccaccttcttcttcgactactggggccagggaaccaccctgacagtgtccagcaccacgacgccagcgccgcgaccaccaacaccggcgcccaccatcgcgtcgcagcccctgtccctgcgcccagaggcgtgccggccagcggcggggggcgcagtgcacacgagggggctggacttcgcctgtgatatctacatctgggcgcccttggccgggacttgtggggtccttctcctgtcactggttatcaccctttactgcaaacggggcagaaagaaactcctgtatatattcaaacaaccatttatgagaccagtacaaactactcaagaggaagatggctgtagctgccgatttccagaagaagaagaaggaggatgtgaactgagagtgaagttcagcaggagcgcagacgcccccgcgtacaagcagggccagaaccagctctataacgagctcaatctaggacgaagagaggagtacgatgttttggacaagaggcgtggccgggaccctgagatggggggaaagccgagaaggaagaaccctcaggaaggcctgtacaatgaactgcagaaagataagatggcggaggcctacagtgagattgggatgaaaggcgagcgccggaggggcaaggggcacgatggcctttaccagggtctcagtacagccaccaaggacacctacgacgcccttcacatgcaggccctgccccctcgctaatctagaggcgcgcccctctccctcccccccccctaacgttactggccgaagccgcttggaataaggccggtgtgcgtttgtctatatgttattttccaccatattgccgtcttttggcaatgtgagggcccggaaacctggccctgtcttcttgacgagcattcctaggggtctttcccctctcgccaaaggaatgcaaggtctgttgaatgtcgtgaaggaagcagttcctctggaagcttcttgaagacaaacaacgtctgtagcgaccctttgcaggcagcggaaccccccacctggcgacaggtgcctctgcggccaaaagccacgtgtataagatacacctgcaaaggcggcacaaccccagtgccacgttgtgagttggatagttgtggaaagagtcaaatggctctcctcaagcgtattcaacaaggggctgaaggatgcccagaaggtaccccattgtatgggatctgatctggggcctcggtacacatgctttacatgtgtttagtcgaggttaaaaaaacgtctaggccccccgaaccacggggacgtggttttcctttgaaaaacacgatgataatatggccacaacccatatgatggccttaccagtgaccgccttgctcctgccgctggccttgctgctccacgccgccaggccgatgggctggtcctgcatcatcctgttcctggtggccaccgccaccggcgtgcactccaacatcgtgctgacccagtcccccgcctccctggccgtgtccctgggccagcgggccaccatctcctgccgggcctccgagtccgtggactcctacggcaactccttcatgcactggtaccagcagaagcccggccagccccccaagctgctgatctacctggcctccaacctggagtccggcgtgcccgcccggttctccggctccggctcccggaccgacttcaccctgaccatcgaccccgtggaggccgacgacgtggccacctactactgccagcagaacaacggcgacccctacaccttcggcggcggcaccaagctggagatcatccggggcggcggcggctccggcggcggcggctccggcggcggcggctccatgggctggtcctgcatcatcctgttcctggtggccaccgccaccggcgtgcactccgaggtgcagctggtggagtccggcggcggcctgatgcagcccaagggctccctgaagctgtcctgcgccgcctccggcttcaccttcaagacctacgccctgaactgggtgcggcaggcccccggcaccggcctggagtgggtggcccggatccggtccaagtccaacaactacaccacctactacgccgactccgtgaaggaccggttcaccatctcccgggacgactcccagaacatgctgtacctgcagatgaacaacctgaagaccgaggacaccgccatgtactactgcgtgcggccccagtccggcacctccttcgcctactggggccagggcaccctggtgaccgtgtccgccgccaccacgacgccagcgccgcgaccaccaacaccggcgcccaccatcgcgtcgcagcccctgtccctgcgcccagaggcgtgccggccagcggcggggggcgcagtgcacacgagggggctggacttcgcctgtgatatctacatctgggcgcccttggccgggacttgtggggtccttctcctgtcactggttatcaccaaacggggcagaaagaaactcctgtatatattcaaacaaccatttatgagaccagtacaaactactcaagaggaagatggctgtagctgccgatttccagaagaagaagaaggaggatgtgaactgagagtgaagttcagcaggagcgcagacgcccccgcgtacaagcagggccagaaccagctctataacgagctcaatctaggacgaagagaggagtacgatgttttggacaagaggcgtggccgggaccctgagatggggggaaagccgagaaggaagaaccctcaggaaggcctgtacaatgaactgcagaaagataagatggcggaggcctacagtgagattgggatgaaaggcgagcgccggaggggcaaggggcacgatggcctttaccagggtctcagtacagccaccaaggacacctacgacgcccttcacatgcaggccctgccccctcgctaa

SEQ ID NO: 243 - DNA, 3647 bp, Artificial Sequence
  Synthesized
atggccttaccagtgaccgccttgctcctgccgctggccttgctgctccacgccgccaggccggacatcgtgatgacccagtccccctccagcctgacagtgacagccggcgagaaggtgacaatgatctgtaagtccagccagagcctgctgaacagcggcgaccagaagaactacctgacctggtaccagcagaagcctggccagccccccaagctgctgatcttctgggccagcacaagggagagcggcgtgcccgacagattcacaggcagcggcagcggcaccgacttcacactgaccatttcctccgtgcaggccgaggacctcgccgtgtactactgccagaacgactactcctaccccctgacattcggcgccggcaccaaactggagctgaagggtggcggtggctcgggcggtggtgggtcgggtggcggcggatctcaggtgcagctccagcagtccgatgccgagctggtgaagcccggaagcagcgtcaagatcagctgtaaggcctccggctacaccttcacagaccacgccatccactgggtgaagcagaagcccgagcagggcctggagtggatcggccactttagccccggaaacaccgacatcaagtacaacgacaagttcaagggcaaggccaccctgaccgtggacaggagcagcagcaccgcctacatgcagctgaacagcctgacaagcgaggacagcgccgtgtacttctgcaagacctccaccttcttcttcgactactggggccagggaaccaccctgacagtgtccagcaccacgacgccagcgccgcgaccaccaacaccggcgcccaccatcgcgtcgcagcccctgtccctgcgcccagaggcgtgccggccagcggcggggggcgcagtgcacacgagggggctggacttcgcctgtgatatctacatctgggcgcccttggccgggacttgtggggtccttctcctgtcactggttatcaccaaacggggcagaaagaaactcctgtatatattcaaacaaccatttatgagaccagtacaaactactcaagaggaagatggctgtagctgccgatttccagaagaagaagaaggaggatgtgaactgagagtgaagttcagcaggagcgcagacgcccccgcgtacaagcagggccagaaccagctctataacgagctcaatctaggacgaagagaggagtacgatgttttggacaagaggcgtggccgggaccctgagatggggggaaagccgagaaggaagaaccctcaggaaggcctgtacaatgaactgcagaaagataagatggcggaggcctacagtgagattgggatgaaaggcgagcgccggaggggcaaggggcacgatggcctttaccagggtctcagtacagccaccaaggacacctacgacgcccttcacatgcaggccctgccccctcgctaatctagaggcgcgcccctctccctcccccccccctaacgttactggccgaagccgcttggaataaggccggtgtgcgtttgtctatatgttattttccaccatattgccgtcttttggcaatgtgagggcccggaaacctggccctgtcttcttgacgagcattcctaggggtctttcccctctcgccaaaggaatgcaaggtctgttgaatgtcgtgaaggaagcagttcctctggaagcttcttgaagacaaacaacgtctgtagcgaccctttgcaggcagcggaaccccccacctggcgacaggtgcctctgcggccaaaagccacgtgtataagatacacctgcaaaggcggcacaaccccagtgccacgttgtgagttggatagttgtggaaagagtcaaatggctctcctcaagcgtattcaacaaggggctgaaggatgcccagaaggtaccccattgtatgggatctgatctggggcctcggtacacatgctttacatgtgtttagtcgaggttaaaaaaacgtctaggccccccgaaccacggggacgtggttttcctttgaaaaacacgatgataatatggccacaacccatatgatggccttaccagtgaccgccttgctcctgccgctggccttgctgctccacgccgccaggccgatgggctggtcctgcatcatcctgttcctggtggccaccgccaccggcgtgcactccaacatcgtgctgacccagtcccccgcctccctggccgtgtccctgggccagcgggccaccatctcctgccgggcctccgagtccgtggactcctacggcaactccttcatgcactggtaccagcagaagcccggccagccccccaagctgctgatctacctggcctccaacctggagtccggcgtgcccgcccggttctccggctccggctcccggaccgacttcaccctgaccatcgaccccgtggaggccgacgacgtggccacctactactgccagcagaacaacggcgacccctacaccttcggcggcggcaccaagctggagatcatccggggcggcggcggctccggcggcggcggctccggcggcggcggctccatgggctggtcctgcatcatcctgttcctggtggccaccgccaccggcgtgcactccgaggtgcagctggtggagtccggcggcggcctgatgcagcccaagggctccctgaagctgtcctgcgccgcctccggcttcaccttcaagacctacgccctgaactgggtgcggcaggcccccggcaccggcctggagtgggtggcccggatccggtccaagtccaacaactacaccacctactacgccgactccgtgaaggaccggttcaccatctcccgggacgactcccagaacatgctgtacctgcagatgaacaacctgaagaccgaggacaccgccatgtactactgcgtgcggccccagtccggcacctccttcgcctactggggccagggcaccctggtgaccgtgtccgccgccaccacgacgccagcgccgcgaccaccaacaccggcgcccaccatcgcgtcgcagcccctgtccctgcgcccagaggcgtgccggccagcggcggggggcgcagtgcacacgagggggctggacttcgcctgtgatatctacatctgggcgcccttggccgggacttgtggggtccttctcctgtcactggttatcaccaaacggggcagaaagaaactcctgtatatattcaaacaaccatttatgagaccagtacaaactactcaagaggaagatggctgtagctgccgatttccagaagaagaagaaggaggatgtgaactgagagtgaagttcagcaggagcgcagacgcccccgcgtacaagcagggccagaaccagctctataacgagctcaatctaggacgaagagaggagtacgatgttttggacaagaggcgtggccgggaccctgagatggggggaaagccgagaaggaagaaccctcaggaaggcctgtacaatgaactgcagaaagataagatggcggaggcctacagtgagattgggatgaaaggcgagcgccggaggggcaaggggcacgatggcctttaccagggtctcagtacagccaccaaggacacctacgacgcccttcacatgcaggccctgccccctcgctaa

SEQ ID NO: 244 - DNA, 3518 bp, Artificial Sequence
  Synthesized
atggccttaccagtgaccgccttgctcctgccgctggccttgctgctccacgccgccaggccggatattgtgatgacccagtccccgtcctccctgaccgtgaccgcgggcgaaaaagtgaccatgatttgcaaatcctcccagtccctgctgaattccggcgatcagaaaaattatctgacctggtatcagcagaaaccgggccagccgccgaaactgctgattttttgggcgtccacccgtgaatccggcgtgccggatcgttttaccggctccggctccggcaccgattttaccctgaccatttcctccgtgcaggcggaagatctggcggtgtattattgccagaatgattattcctatccgctgacctttggcgcgggcaccaaactggaactgaaaggcggcggcggctccggcggcggcggctccggcggcggcggctcccaggtgcagctgcagcagtccgatgcggaactggtgaaaccgggctcctccgtgaaaatttcctgcaaagcgtccggctatacctttaccgatcatgcgattcattgggtgaaacagaaaccggaacagggcctggaatggattggccatttttccccgggcaataccgatattaaatataatgataaatttaaaggcaaagcgaccctgaccgtggatcgttcctcctccaccgcgtatatgcagctgaattccctgacctccgaagattccgcggtgtatttttgcaaaacctccacctttttttttgattattggggccagggcaccaccctgaccgtgtcctccaccacgacgccagcgccgcgaccaccaacaccggcgcccaccatcgcgtcgcagcccctgtccctgcgcccagaggcgtgccggccagcggcggggggcgcagtgcacacgagggggctggacttcgcctgtgatatctacatctgggcgcccttggccgggacttgtggggtccttctcctgtcactggttatcaccctttactgcaaacggggcagaaagaaactcctgtatatattcaaacaaccatttatgagaccagtacaaactactcaagaggaagatggctgtagctgccgatttccagaagaagaagaaggaggatgtgaactgagagtgaagttcagcaggagcgcagacgcccccgcgtacaagcagggccagaaccagctctataacgagctcaatctaggacgaagagaggagtacgatgttttggacaagaggcgtggccgggaccctgagatggggggaaagccgagaaggaagaaccctcaggaaggcctgtacaatgaactgcagaaagataagatggcggaggcctacagtgagattgggatgaaaggcgagcgccggaggggcaaggggcacgatggcctttaccagggtctcagtacagccaccaaggacacctacgacgcccttcacatgcaggccctgccccctcgctaatctagaggcgcgcccctctccctcccccccccctaacgttactggccgaagccgcttggaataaggccggtgtgcgtttgtctatatgttattttccaccatattgccgtcttttggcaatgtgagggcccggaaacctggccctgtcttcttgacgagcattcctaggggtctttcccctctcgccaaaggaatgcaaggtctgttgaatgtcgtgaaggaagcagttcctctggaagcttcttgaagacaaacaacgtctgtagcgaccctttgcaggcagcggaaccccccacctggcgacaggtgcctctgcggccaaaagccacgtgtataagatacacctgcaaaggcggcacaaccccagtgccacgttgtgagttggatagttgtggaaagagtcaaatggctctcctcaagcgtattcaacaaggggctgaaggatgcccagaaggtaccccattgtatgggatctgatctggggcctcggtacacatgctttacatgtgtttagtcgaggttaaaaaaacgtctaggccccccgaaccacggggacgtggttttcctttgaaaaacacgatgataatatggccacaacccatatgatggccttaccagtgaccgccttgctcctgccgctggccttgctgctccacgccgccaggccggacatccagctcacccagtccccgagctcgctgtccgcctccgtgggagatcgggtcaccatcacgtgccgcgccagccagtcgatttcctcctacctgaactggtaccaacagaagcccggaaaagccccgaagcttctcatctacgccgcctcgagcctgcagtcaggagtgccctcacggttctccggctccggttccggtactgatttcaccctgaccatttcctccctgcaaccggaggacttcgctacttactactgccagcagtcgtactccaccccctacactttcggacaaggcaccaaggtcgaaatcaagggtggcggtggctcgggcggtggtgggtcgggtggcggcggatctgaagtgcaattggtggaatcagggggaggacttgtgcagcctggaggatcgctgagactgtcatgtgccgtgtccggctttgccctgtccaaccacgggatgtcctgggtccgccgcgcgcctggaaagggcctcgaatgggtgtcgggtattgtgtacagcggtagcacctactatgccgcatccgtgaaggggagattcaccatcagccgggacaactccaggaacactctgtacctccaaatgaattcgctgaggccagaggacactgccatctactactgctccgcgcatggcggagagtccgacgtctggggacaggggaccaccgtgaccgtgtctagcaccacgacgccagcgccgcgaccaccaacaccggcgcccaccatcgcgtcgcagcccctgtccctgcgcccagaggcgtgccggccagcggcggggggcgcagtgcacacgagggggctggacttcgcctgtgatatctacatctgggcgcccttggccgggacttgtggggtccttctcctgtcactggttatcaccctttactgcaaacggggcagaaagaaactcctgtatatattcaaacaaccatttatgagaccagtacaaactactcaagaggaagatggctgtagctgccgatttccagaagaagaagaaggaggatgtgaactgagagtgaagttcagcaggagcgcagacgcccccgcgtacaagcagggccagaaccagctctataacgagctcaatctaggacgaagagaggagtacgatgttttggacaagaggcgtggccgggaccctgagatggggggaaagccgagaaggaagaaccctcaggaaggcctgtacaatgaactgcagaaagataagatggcggaggcctacagtgagattgggatgaaaggcgagcgccggaggggcaaggggcacgatggcctttaccagggtctcagtacagccaccaaggacacctacgacgcccttcacatgcaggccctgccccctcgctaa

SEQ ID NO: 245 - protein, 482 aa, Artificial Sequence
  Synthesized
MALPVTALLLPLALLLHAARPEIVLTQSPGTLSLSPGERATLSCRGGQSVSSSYLAWYQQKPGQAPRLLMYDASIRATGIPDRFSGSGSGTDFTLTISRLEPEDFAVYYCQQYQSWPLTFGQGTKVEIKGGGGSGGGGSGGGGSEVQLLESGGGLVQPGGSLRLSCAASGFTFSSYAMNWVRQAPGKGLEWVSAILSSGGSTYYADSVKGRFTISRDNSKNTLYLQMNSLRAEDTAVYYCARYWPMDIWGQGTLVTVSSTTTPAPRPPTPAPTIASQPLSLRPEACRPAAGGAVHTRGLDFACDIYIWAPLAGTCGVLLLSLVITLYCKRGRKKLLYIFKQPFMRPVQTTQEEDGCSCRFPEEEEGGCELRVKFSRSADAPAYQQGQNQLYNELNLGRREEYDVLDKRRGRDPEMGGKPRRKNPQEGLYNELQKDKMAEAYSEIGMKGERRRGKGHDGLYQGLSTATKDTYDALHMQALPPR

SEQ ID NO: 246 - DNA, 3509 bp, Artificial Sequence
  Synthesized
atggccttaccagtgaccgccttgctcctgccgctggccttgctgctccacgccgccaggccggatattgtgatgacccagtccccgtcctccctgaccgtgaccgcgggcgaaaaagtgaccatgatttgcaaatcctcccagtccctgctgaattccggcgatcagaaaaattatctgacctggtatcagcagaaaccgggccagccgccgaaactgctgattttttgggcgtccacccgtgaatccggcgtgccggatcgttttaccggctccggctccggcaccgattttaccctgaccatttcctccgtgcaggcggaagatctggcggtgtattattgccagaatgattattcctatccgctgacctttggcgcgggcaccaaactggaactgaaaggcggcggcggctccggcggcggcggctccggcggcggcggctcccaggtgcagctgcagcagtccgatgcggaactggtgaaaccgggctcctccgtgaaaatttcctgcaaagcgtccggctatacctttaccgatcatgcgattcattgggtgaaacagaaaccggaacagggcctggaatggattggccatttttccccgggcaataccgatattaaatataatgataaatttaaaggcaaagcgaccctgaccgtggatcgttcctcctccaccgcgtatatgcagctgaattccctgacctccgaagattccgcggtgtatttttgcaaaacctccacctttttttttgattattggggccagggcaccaccctgaccgtgtcctccaccacgacgccagcgccgcgaccaccaacaccggcgcccaccatcgcgtcgcagcccctgtccctgcgcccagaggcgtgccggccagcggcggggggcgcagtgcacacgagggggctggacttcgcctgtgatatctacatctgggcgcccttggccgggacttgtggggtccttctcctgtcactggttatcaccaaacggggcagaaagaaactcctgtatatattcaaacaaccatttatgagaccagtacaaactactcaagaggaagatggctgtagctgccgatttccagaagaagaagaaggaggatgtgaactgagagtgaagttcagcaggagcgcagacgcccccgcgtacaagcagggccagaaccagctctataacgagctcaatctaggacgaagagaggagtacgatgttttggacaagaggcgtggccgggaccctgagatggggggaaagccgagaaggaagaaccctcaggaaggcctgtacaatgaactgcagaaagataagatggcggaggcctacagtgagattgggatgaaaggcgagcgccggaggggcaaggggcacgatggcctttaccagggtctcagtacagccaccaaggacacctacgacgcccttcacatgcaggccctgccccctcgctaatctagaggcgcgcccctctccctcccccccccctaacgttactggccgaagccgcttggaataaggccggtgtgcgtttgtctatatgttattttccaccatattgccgtcttttggcaatgtgagggcccggaaacctggccctgtcttcttgacgagcattcctaggggtctttcccctctcgccaaaggaatgcaaggtctgttgaatgtcgtgaaggaagcagttcctctggaagcttcttgaagacaaacaacgtctgtagcgaccctttgcaggcagcggaaccccccacctggcgacaggtgcctctgcggccaaaagccacgtgtataagatacacctgcaaaggcggcacaaccccagtgccacgttgtgagttggatagttgtggaaagagtcaaatggctctcctcaagcgtattcaacaaggggctgaaggatgcccagaaggtaccccattgtatgggatctgatctggggcctcggtacacatgctttacatgtgtttagtcgaggttaaaaaaacgtctaggccccccgaaccacggggacgtggttttcctttgaaaaacacgatgataatatggccacaacccatatgatggccttaccagtgaccgccttgctcctgccgctggccttgctgctccacgccgccaggccggacatccagctcacccagtccccgagctcgctgtccgcctccgtgggagatcgggtcaccatcacgtgccgcgccagccagtcgatttcctcctacctgaactggtaccaacagaagcccggaaaagccccgaagcttctcatctacgccgcctcgagcctgcagtcaggagtgccctcacggttctccggctccggttccggtactgatttcaccctgaccatttcctccctgcaaccggaggacttcgctacttactactgccagcagtcgtactccaccccctacactttcggacaaggcaccaaggtcgaaatcaagggtggcggtggctcgggcggtggtgggtcgggtggcggcggatctgaagtgcaattggtggaatcagggggaggacttgtgcagcctggaggatcgctgagactgtcatgtgccgtgtccggctttgccctgtccaaccacgggatgtcctgggtccgccgcgcgcctggaaagggcctcgaatgggtgtcgggtattgtgtacagcggtagcacctactatgccgcatccgtgaaggggagattcaccatcagccgggacaactccaggaacactctgtacctccaaatgaattcgctgaggccagaggacactgccatctactactgctccgcgcatggcggagagtccgacgtctggggacaggggaccaccgtgaccgtgtctagcaccacgacgccagcgccgcgaccaccaacaccggcgcccaccatcgcgtcgcagcccctgtccctgcgcccagaggcgtgccggccagcggcggggggcgcagtgcacacgagggggctggacttcgcctgtgatatctacatctgggcgcccttggccgggacttgtggggtccttctcctgtcactggttatcaccctttactgcaaacggggcagaaagaaactcctgtatatattcaaacaaccatttatgagaccagtacaaactactcaagaggaagatggctgtagctgccgatttccagaagaagaagaaggaggatgtgaactgagagtgaagttcagcaggagcgcagacgcccccgcgtacaagcagggccagaaccagctctataacgagctcaatctaggacgaagagaggagtacgatgttttggacaagaggcgtggccgggaccctgagatggggggaaagccgagaaggaagaaccctcaggaaggcctgtacaatgaactgcagaaagataagatggcggaggcctacagtgagattgggatgaaaggcgagcgccggaggggcaaggggcacgatggcctttaccagggtctcagtacagccaccaaggacacctacgacgcccttcacatgcaggccctgccccctcgctaa

SEQ ID NO: 247 - DNA, 3509 bp, Artificial Sequence
  Synthesized
atggccttaccagtgaccgccttgctcctgccgctggccttgctgctccacgccgccaggccggatattgtgatgacccagtccccgtcctccctgaccgtgaccgcgggcgaaaaagtgaccatgatttgcaaatcctcccagtccctgctgaattccggcgatcagaaaaattatctgacctggtatcagcagaaaccgggccagccgccgaaactgctgattttttgggcgtccacccgtgaatccggcgtgccggatcgttttaccggctccggctccggcaccgattttaccctgaccatttcctccgtgcaggcggaagatctggcggtgtattattgccagaatgattattcctatccgctgacctttggcgcgggcaccaaactggaactgaaaggcggcggcggctccggcggcggcggctccggcggcggcggctcccaggtgcagctgcagcagtccgatgcggaactggtgaaaccgggctcctccgtgaaaatttcctgcaaagcgtccggctatacctttaccgatcatgcgattcattgggtgaaacagaaaccggaacagggcctggaatggattggccatttttccccgggcaataccgatattaaatataatgataaatttaaaggcaaagcgaccctgaccgtggatcgttcctcctccaccgcgtatatgcagctgaattccctgacctccgaagattccgcggtgtatttttgcaaaacctccacctttttttttgattattggggccagggcaccaccctgaccgtgtcctccaccacgacgccagcgccgcgaccaccaacaccggcgcccaccatcgcgtcgcagcccctgtccctgcgcccagaggcgtgccggccagcggcggggggcgcagtgcacacgagggggctggacttcgcctgtgatatctacatctgggcgcccttggccgggacttgtggggtccttctcctgtcactggttatcaccctttactgcaaacggggcagaaagaaactcctgtatatattcaaacaaccatttatgagaccagtacaaactactcaagaggaagatggctgtagctgccgatttccagaagaagaagaaggaggatgtgaactgagagtgaagttcagcaggagcgcagacgcccccgcgtacaagcagggccagaaccagctctataacgagctcaatctaggacgaagagaggagtacgatgttttggacaagaggcgtggccgggaccctgagatggggggaaagccgagaaggaagaaccctcaggaaggcctgtacaatgaactgcagaaagataagatggcggaggcctacagtgagattgggatgaaaggcgagcgccggaggggcaaggggcacgatggcctttaccagggtctcagtacagccaccaaggacacctacgacgcccttcacatgcaggccctgccccctcgctaatctagaggcgcgcccctctccctcccccccccctaacgttactggccgaagccgcttggaataaggccggtgtgcgtttgtctatatgttattttccaccatattgccgtcttttggcaatgtgagggcccggaaacctggccctgtcttcttgacgagcattcctaggggtctttcccctctcgccaaaggaatgcaaggtctgttgaatgtcgtgaaggaagcagttcctctggaagcttcttgaagacaaacaacgtctgtagcgaccctttgcaggcagcggaaccccccacctggcgacaggtgcctctgcggccaaaagccacgtgtataagatacacctgcaaaggcggcacaaccccagtgccacgttgtgagttggatagttgtggaaagagtcaaatggctctcctcaagcgtattcaacaaggggctgaaggatgcccagaaggtaccccattgtatgggatctgatctggggcctcggtacacatgctttacatgtgtttagtcgaggttaaaaaaacgtctaggccccccgaaccacggggacgtggttttcctttgaaaaacacgatgataatatggccacaacccatatgatggccttaccagtgaccgccttgctcctgccgctggccttgctgctccacgccgccaggccggacatccagctcacccagtccccgagctcgctgtccgcctccgtgggagatcgggtcaccatcacgtgccgcgccagccagtcgatttcctcctacctgaactggtaccaacagaagcccggaaaagccccgaagcttctcatctacgccgcctcgagcctgcagtcaggagtgccctcacggttctccggctccggttccggtactgatttcaccctgaccatttcctccctgcaaccggaggacttcgctacttactactgccagcagtcgtactccaccccctacactttcggacaaggcaccaaggtcgaaatcaagggtggcggtggctcgggcggtggtgggtcgggtggcggcggatctgaagtgcaattggtggaatcagggggaggacttgtgcagcctggaggatcgctgagactgtcatgtgccgtgtccggctttgccctgtccaaccacgggatgtcctgggtccgccgcgcgcctggaaagggcctcgaatgggtgtcgggtattgtgtacagcggtagcacctactatgccgcatccgtgaaggggagattcaccatcagccgggacaactccaggaacactctgtacctccaaatgaattcgctgaggccagaggacactgccatctactactgctccgcgcatggcggagagtccgacgtctggggacaggggaccaccgtgaccgtgtctagcaccacgacgccagcgccgcgaccaccaacaccggcgcccaccatcgcgtcgcagcccctgtccctgcgcccagaggcgtgccggccagcggcggggggcgcagtgcacacgagggggctggacttcgcctgtgatatctacatctgggcgcccttggccgggacttgtggggtccttctcctgtcactggttatcaccaaacggggcagaaagaaactcctgtatatattcaaacaaccatttatgagaccagtacaaactactcaagaggaagatggctgtagctgccgatttccagaagaagaagaaggaggatgtgaactgagagtgaagttcagcaggagcgcagacgcccccgcgtacaagcagggccagaaccagctctataacgagctcaatctaggacgaagagaggagtacgatgttttggacaagaggcgtggccgggaccctgagatggggggaaagccgagaaggaagaaccctcaggaaggcctgtacaatgaactgcagaaagataagatggcggaggcctacagtgagattgggatgaaaggcgagcgccggaggggcaaggggcacgatggcctttaccagggtctcagtacagccaccaaggacacctacgacgcccttcacatgcaggccctgccccctcgctaa

SEQ ID NO: 248 - protein, 479 aa, Artificial Sequence
  Synthesized
MALPVTALLLPLALLLHAARPEIVLTQSPGTLSLSPGERATLSCRGGQSVSSSYLAWYQQKPGQAPRLLMYDASIRATGIPDRFSGSGSGTDFTLTISRLEPEDFAVYYCQQYQSWPLTFGQGTKVEIKGGGGSGGGGSGGGGSEVQLLESGGGLVQPGGSLRLSCAASGFTFSSYAMNWVRQAPGKGLEWVSAILSSGGSTYYADSVKGRFTISRDNSKNTLYLQMNSLRAEDTAVYYCARYWPMDIWGQGTLVTVSSTTTPAPRPPTPAPTIASQPLSLRPEACRPAAGGAVHTRGLDFACDIYIWAPLAGTCGVLLLSLVITKRGRKKLLYIFKQPFMRPVQTTQEEDGCSCRFPEEEEGGCELRVKFSRSADAPAYQQGQNQLYNELNLGRREEYDVLDKRRGRDPEMGGKPRRKNPQEGLYNELQKDKMAEAYSEIGMKGERRRGKGHDGLYQGLSTATKDTYDALHMQALPPR

SEQ ID NO: 249 - DNA, 3500 bp, Artificial Sequence
  Synthesized
atggccttaccagtgaccgccttgctcctgccgctggccttgctgctccacgccgccaggccggatattgtgatgacccagtccccgtcctccctgaccgtgaccgcgggcgaaaaagtgaccatgatttgcaaatcctcccagtccctgctgaattccggcgatcagaaaaattatctgacctggtatcagcagaaaccgggccagccgccgaaactgctgattttttgggcgtccacccgtgaatccggcgtgccggatcgttttaccggctccggctccggcaccgattttaccctgaccatttcctccgtgcaggcggaagatctggcggtgtattattgccagaatgattattcctatccgctgacctttggcgcgggcaccaaactggaactgaaaggcggcggcggctccggcggcggcggctccggcggcggcggctcccaggtgcagctgcagcagtccgatgcggaactggtgaaaccgggctcctccgtgaaaatttcctgcaaagcgtccggctatacctttaccgatcatgcgattcattgggtgaaacagaaaccggaacagggcctggaatggattggccatttttccccgggcaataccgatattaaatataatgataaatttaaaggcaaagcgaccctgaccgtggatcgttcctcctccaccgcgtatatgcagctgaattccctgacctccgaagattccgcggtgtatttttgcaaaacctccacctttttttttgattattggggccagggcaccaccctgaccgtgtcctccaccacgacgccagcgccgcgaccaccaacaccggcgcccaccatcgcgtcgcagcccctgtccctgcgcccagaggcgtgccggccagcggcggggggcgcagtgcacacgagggggctggacttcgcctgtgatatctacatctgggcgcccttggccgggacttgtggggtccttctcctgtcactggttatcaccaaacggggcagaaagaaactcctgtatatattcaaacaaccatttatgagaccagtacaaactactcaagaggaagatggctgtagctgccgatttccagaagaagaagaaggaggatgtgaactgagagtgaagttcagcaggagcgcagacgcccccgcgtacaagcagggccagaaccagctctataacgagctcaatctaggacgaagagaggagtacgatgttttggacaagaggcgtggccgggaccctgagatggggggaaagccgagaaggaagaaccctcaggaaggcctgtacaatgaactgcagaaagataagatggcggaggcctacagtgagattgggatgaaaggcgagcgccggaggggcaaggggcacgatggcctttaccagggtctcagtacagccaccaaggacacctacgacgcccttcacatgcaggccctgccccctcgctaatctagaggcgcgcccctctccctcccccccccctaacgttactggccgaagccgcttggaataaggccggtgtgcgtttgtctatatgttattttccaccatattgccgtcttttggcaatgtgagggcccggaaacctggccctgtcttcttgacgagcattcctaggggtctttcccctctcgccaaaggaatgcaaggtctgttgaatgtcgtgaaggaagcagttcctctggaagcttcttgaagacaaacaacgtctgtagcgaccctttgcaggcagcggaaccccccacctggcgacaggtgcctctgcggccaaaagccacgtgtataagatacacctgcaaaggcggcacaaccccagtgccacgttgtgagttggatagttgtggaaagagtcaaatggctctcctcaagcgtattcaacaaggggctgaaggatgcccagaaggtaccccattgtatgggatctgatctggggcctcggtacacatgctttacatgtgtttagtcgaggttaaaaaaacgtctaggccccccgaaccacggggacgtggttttcctttgaaaaacacgatgataatatggccacaacccatatgatggccttaccagtgaccgccttgctcctgccgctggccttgctgctccacgccgccaggccggacatccagctcacccagtccccgagctcgctgtccgcctccgtgggagatcgggtcaccatcacgtgccgcgccagccagtcgatttcctcctacctgaactggtaccaacagaagcccggaaaagccccgaagcttctcatctacgccgcctcgagcctgcagtcaggagtgccctcacggttctccggctccggttccggtactgatttcaccctgaccatttcctccctgcaaccggaggacttcgctacttactactgccagcagtcgtactccaccccctacactttcggacaaggcaccaaggtcgaaatcaagggtggcggtggctcgggcggtggtgggtcgggtggcggcggatctgaagtgcaattggtggaatcagggggaggacttgtgcagcctggaggatcgctgagactgtcatgtgccgtgtccggctttgccctgtccaaccacgggatgtcctgggtccgccgcgcgcctggaaagggcctcgaatgggtgtcgggtattgtgtacagcggtagcacctactatgccgcatccgtgaaggggagattcaccatcagccgggacaactccaggaacactctgtacctccaaatgaattcgctgaggccagaggacactgccatctactactgctccgcgcatggcggagagtccgacgtctggggacaggggaccaccgtgaccgtgtctagcaccacgacgccagcgccgcgaccaccaacaccggcgcccaccatcgcgtcgcagcccctgtccctgcgcccagaggcgtgccggccagcggcggggggcgcagtgcacacgagggggctggacttcgcctgtgatatctacatctgggcgcccttggccgggacttgtggggtccttctcctgtcactggttatcaccaaacggggcagaaagaaactcctgtatatattcaaacaaccatttatgagaccagtacaaactactcaagaggaagatggctgtagctgccgatttccagaagaagaagaaggaggatgtgaactgagagtgaagttcagcaggagcgcagacgcccccgcgtacaagcagggccagaaccagctctataacgagctcaatctaggacgaagagaggagtacgatgttttggacaagaggcgtggccgggaccctgagatggggggaaagccgagaaggaagaaccctcaggaaggcctgtacaatgaactgcagaaagataagatggcggaggcctacagtgagattgggatgaaaggcgagcgccggaggggcaaggggcacgatggcctttaccagggtctcagtacagccaccaaggacacctacgacgcccttcacatgcaggccctgccccctcgctaa

SEQ ID NO: 250 - DNA, 3518 bp, Artificial Sequence
  Synthesized
atggccttaccagtgaccgccttgctcctgccgctggccttgctgctccacgccgccaggccggacatcgtgatgacccagtccccctccagcctgacagtgacagccggcgagaaggtgacaatgatctgtaagtccagccagagcctgctgaacagcggcgaccagaagaactacctgacctggtaccagcagaagcctggccagccccccaagctgctgatcttctgggccagcacaagggagagcggcgtgcccgacagattcacaggcagcggcagcggcaccgacttcacactgaccatttcctccgtgcaggccgaggacctcgccgtgtactactgccagaacgactactcctaccccctgacattcggcgccggcaccaaactggagctgaagggtggcggtggctcgggcggtggtgggtcgggtggcggcggatctcaggtgcagctccagcagtccgatgccgagctggtgaagcccggaagcagcgtcaagatcagctgtaaggcctccggctacaccttcacagaccacgccatccactgggtgaagcagaagcccgagcagggcctggagtggatcggccactttagccccggaaacaccgacatcaagtacaacgacaagttcaagggcaaggccaccctgaccgtggacaggagcagcagcaccgcctacatgcagctgaacagcctgacaagcgaggacagcgccgtgtacttctgcaagacctccaccttcttcttcgactactggggccagggaaccaccctgacagtgtccagcaccacgacgccagcgccgcgaccaccaacaccggcgcccaccatcgcgtcgcagcccctgtccctgcgcccagaggcgtgccggccagcggcggggggcgcagtgcacacgagggggctggacttcgcctgtgatatctacatctgggcgcccttggccgggacttgtggggtccttctcctgtcactggttatcaccctttactgcaaacggggcagaaagaaactcctgtatatattcaaacaaccatttatgagaccagtacaaactactcaagaggaagatggctgtagctgccgatttccagaagaagaagaaggaggatgtgaactgagagtgaagttcagcaggagcgcagacgcccccgcgtacaagcagggccagaaccagctctataacgagctcaatctaggacgaagagaggagtacgatgttttggacaagaggcgtggccgggaccctgagatggggggaaagccgagaaggaagaaccctcaggaaggcctgtacaatgaactgcagaaagataagatggcggaggcctacagtgagattgggatgaaaggcgagcgccggaggggcaaggggcacgatggcctttaccagggtctcagtacagccaccaaggacacctacgacgcccttcacatgcaggccctgccccctcgctaatctagaggcgcgcccctctccctcccccccccctaacgttactggccgaagccgcttggaataaggccggtgtgcgtttgtctatatgttattttccaccatattgccgtcttttggcaatgtgagggcccggaaacctggccctgtcttcttgacgagcattcctaggggtctttcccctctcgccaaaggaatgcaaggtctgttgaatgtcgtgaaggaagcagttcctctggaagcttcttgaagacaaacaacgtctgtagcgaccctttgcaggcagcggaaccccccacctggcgacaggtgcctctgcggccaaaagccacgtgtataagatacacctgcaaaggcggcacaaccccagtgccacgttgtgagttggatagttgtggaaagagtcaaatggctctcctcaagcgtattcaacaaggggctgaaggatgcccagaaggtaccccattgtatgggatctgatctggggcctcggtacacatgctttacatgtgtttagtcgaggttaaaaaaacgtctaggccccccgaaccacggggacgtggttttcctttgaaaaacacgatgataatatggccacaacccatatgatggccttaccagtgaccgccttgctcctgccgctggccttgctgctccacgccgccaggccggacatccagctcacccagtccccgagctcgctgtccgcctccgtgggagatcgggtcaccatcacgtgccgcgccagccagtcgatttcctcctacctgaactggtaccaacagaagcccggaaaagccccgaagcttctcatctacgccgcctcgagcctgcagtcaggagtgccctcacggttctccggctccggttccggtactgatttcaccctgaccatttcctccctgcaaccggaggacttcgctacttactactgccagcagtcgtactccaccccctacactttcggacaaggcaccaaggtcgaaatcaagggtggcggtggctcgggcggtggtgggtcgggtggcggcggatctgaagtgcaattggtggaatcagggggaggacttgtgcagcctggaggatcgctgagactgtcatgtgccgtgtccggctttgccctgtccaaccacgggatgtcctgggtccgccgcgcgcctggaaagggcctcgaatgggtgtcgggtattgtgtacagcggtagcacctactatgccgcatccgtgaaggggagattcaccatcagccgggacaactccaggaacactctgtacctccaaatgaattcgctgaggccagaggacactgccatctactactgctccgcgcatggcggagagtccgacgtctggggacaggggaccaccgtgaccgtgtctagcaccacgacgccagcgccgcgaccaccaacaccggcgcccaccatcgcgtcgcagcccctgtccctgcgcccagaggcgtgccggccagcggcggggggcgcagtgcacacgagggggctggacttcgcctgtgatatctacatctgggcgcccttggccgggacttgtggggtccttctcctgtcactggttatcaccctttactgcaaacggggcagaaagaaactcctgtatatattcaaacaaccatttatgagaccagtacaaactactcaagaggaagatggctgtagctgccgatttccagaagaagaagaaggaggatgtgaactgagagtgaagttcagcaggagcgcagacgcccccgcgtacaagcagggccagaaccagctctataacgagctcaatctaggacgaagagaggagtacgatgttttggacaagaggcgtggccgggaccctgagatggggggaaagccgagaaggaagaaccctcaggaaggcctgtacaatgaactgcagaaagataagatggcggaggcctacagtgagattgggatgaaaggcgagcgccggaggggcaaggggcacgatggcctttaccagggtctcagtacagccaccaaggacacctacgacgcccttcacatgcaggccctgccccctcgctaa

SEQ ID NO: 251 - DNA, 3509 bp, Artificial Sequence
  Synthesized
atggccttaccagtgaccgccttgctcctgccgctggccttgctgctccacgccgccaggccggacatcgtgatgacccagtccccctccagcctgacagtgacagccggcgagaaggtgacaatgatctgtaagtccagccagagcctgctgaacagcggcgaccagaagaactacctgacctggtaccagcagaagcctggccagccccccaagctgctgatcttctgggccagcacaagggagagcggcgtgcccgacagattcacaggcagcggcagcggcaccgacttcacactgaccatttcctccgtgcaggccgaggacctcgccgtgtactactgccagaacgactactcctaccccctgacattcggcgccggcaccaaactggagctgaagggtggcggtggctcgggcggtggtgggtcgggtggcggcggatctcaggtgcagctccagcagtccgatgccgagctggtgaagcccggaagcagcgtcaagatcagctgtaaggcctccggctacaccttcacagaccacgccatccactgggtgaagcagaagcccgagcagggcctggagtggatcggccactttagccccggaaacaccgacatcaagtacaacgacaagttcaagggcaaggccaccctgaccgtggacaggagcagcagcaccgcctacatgcagctgaacagcctgacaagcgaggacagcgccgtgtacttctgcaagacctccaccttcttcttcgactactggggccagggaaccaccctgacagtgtccagcaccacgacgccagcgccgcgaccaccaacaccggcgcccaccatcgcgtcgcagcccctgtccctgcgcccagaggcgtgccggccagcggcggggggcgcagtgcacacgagggggctggacttcgcctgtgatatctacatctgggcgcccttggccgggacttgtggggtccttctcctgtcactggttatcaccaaacggggcagaaagaaactcctgtatatattcaaacaaccatttatgagaccagtacaaactactcaagaggaagatggctgtagctgccgatttccagaagaagaagaaggaggatgtgaactgagagtgaagttcagcaggagcgcagacgcccccgcgtacaagcagggccagaaccagctctataacgagctcaatctaggacgaagagaggagtacgatgttttggacaagaggcgtggccgggaccctgagatggggggaaagccgagaaggaagaaccctcaggaaggcctgtacaatgaactgcagaaagataagatggcggaggcctacagtgagattgggatgaaaggcgagcgccggaggggcaaggggcacgatggcctttaccagggtctcagtacagccaccaaggacacctacgacgcccttcacatgcaggccctgccccctcgctaatctagaggcgcgcccctctccctcccccccccctaacgttactggccgaagccgcttggaataaggccggtgtgcgtttgtctatatgttattttccaccatattgccgtcttttggcaatgtgagggcccggaaacctggccctgtcttcttgacgagcattcctaggggtctttcccctctcgccaaaggaatgcaaggtctgttgaatgtcgtgaaggaagcagttcctctggaagcttcttgaagacaaacaacgtctgtagcgaccctttgcaggcagcggaaccccccacctggcgacaggtgcctctgcggccaaaagccacgtgtataagatacacctgcaaaggcggcacaaccccagtgccacgttgtgagttggatagttgtggaaagagtcaaatggctctcctcaagcgtattcaacaaggggctgaaggatgcccagaaggtaccccattgtatgggatctgatctggggcctcggtacacatgctttacatgtgtttagtcgaggttaaaaaaacgtctaggccccccgaaccacggggacgtggttttcctttgaaaaacacgatgataatatggccacaacccatatgatggccttaccagtgaccgccttgctcctgccgctggccttgctgctccacgccgccaggccggacatccagctcacccagtccccgagctcgctgtccgcctccgtgggagatcgggtcaccatcacgtgccgcgccagccagtcgatttcctcctacctgaactggtaccaacagaagcccggaaaagccccgaagcttctcatctacgccgcctcgagcctgcagtcaggagtgccctcacggttctccggctccggttccggtactgatttcaccctgaccatttcctccctgcaaccggaggacttcgctacttactactgccagcagtcgtactccaccccctacactttcggacaaggcaccaaggtcgaaatcaagggtggcggtggctcgggcggtggtgggtcgggtggcggcggatctgaagtgcaattggtggaatcagggggaggacttgtgcagcctggaggatcgctgagactgtcatgtgccgtgtccggctttgccctgtccaaccacgggatgtcctgggtccgccgcgcgcctggaaagggcctcgaatgggtgtcgggtattgtgtacagcggtagcacctactatgccgcatccgtgaaggggagattcaccatcagccgggacaactccaggaacactctgtacctccaaatgaattcgctgaggccagaggacactgccatctactactgctccgcgcatggcggagagtccgacgtctggggacaggggaccaccgtgaccgtgtctagcaccacgacgccagcgccgcgaccaccaacaccggcgcccaccatcgcgtcgcagcccctgtccctgcgcccagaggcgtgccggccagcggcggggggcgcagtgcacacgagggggctggacttcgcctgtgatatctacatctgggcgcccttggccgggacttgtggggtccttctcctgtcactggttatcaccctttactgcaaacggggcagaaagaaactcctgtatatattcaaacaaccatttatgagaccagtacaaactactcaagaggaagatggctgtagctgccgatttccagaagaagaagaaggaggatgtgaactgagagtgaagttcagcaggagcgcagacgcccccgcgtacaagcagggccagaaccagctctataacgagctcaatctaggacgaagagaggagtacgatgttttggacaagaggcgtggccgggaccctgagatggggggaaagccgagaaggaagaaccctcaggaaggcctgtacaatgaactgcagaaagataagatggcggaggcctacagtgagattgggatgaaaggcgagcgccggaggggcaaggggcacgatggcctttaccagggtctcagtacagccaccaaggacacctacgacgcccttcacatgcaggccctgccccctcgctaa

SEQ ID NO: 252 - DNA, 3509 bp, Artificial Sequence
  Synthesized
atggccttaccagtgaccgccttgctcctgccgctggccttgctgctccacgccgccaggccggacatcgtgatgacccagtccccctccagcctgacagtgacagccggcgagaaggtgacaatgatctgtaagtccagccagagcctgctgaacagcggcgaccagaagaactacctgacctggtaccagcagaagcctggccagccccccaagctgctgatcttctgggccagcacaagggagagcggcgtgcccgacagattcacaggcagcggcagcggcaccgacttcacactgaccatttcctccgtgcaggccgaggacctcgccgtgtactactgccagaacgactactcctaccccctgacattcggcgccggcaccaaactggagctgaagggtggcggtggctcgggcggtggtgggtcgggtggcggcggatctcaggtgcagctccagcagtccgatgccgagctggtgaagcccggaagcagcgtcaagatcagctgtaaggcctccggctacaccttcacagaccacgccatccactgggtgaagcagaagcccgagcagggcctggagtggatcggccactttagccccggaaacaccgacatcaagtacaacgacaagttcaagggcaaggccaccctgaccgtggacaggagcagcagcaccgcctacatgcagctgaacagcctgacaagcgaggacagcgccgtgtacttctgcaagacctccaccttcttcttcgactactggggccagggaaccaccctgacagtgtccagcaccacgacgccagcgccgcgaccaccaacaccggcgcccaccatcgcgtcgcagcccctgtccctgcgcccagaggcgtgccggccagcggcggggggcgcagtgcacacgagggggctggacttcgcctgtgatatctacatctgggcgcccttggccgggacttgtggggtccttctcctgtcactggttatcaccctttactgcaaacggggcagaaagaaactcctgtatatattcaaacaaccatttatgagaccagtacaaactactcaagaggaagatggctgtagctgccgatttccagaagaagaagaaggaggatgtgaactgagagtgaagttcagcaggagcgcagacgcccccgcgtacaagcagggccagaaccagctctataacgagctcaatctaggacgaagagaggagtacgatgttttggacaagaggcgtggccgggaccctgagatggggggaaagccgagaaggaagaaccctcaggaaggcctgtacaatgaactgcagaaagataagatggcggaggcctacagtgagattgggatgaaaggcgagcgccggaggggcaaggggcacgatggcctttaccagggtctcagtacagccaccaaggacacctacgacgcccttcacatgcaggccctgccccctcgctaatctagaggcgcgcccctctccctcccccccccctaacgttactggccgaagccgcttggaataaggccggtgtgcgtttgtctatatgttattttccaccatattgccgtcttttggcaatgtgagggcccggaaacctggccctgtcttcttgacgagcattcctaggggtctttcccctctcgccaaaggaatgcaaggtctgttgaatgtcgtgaaggaagcagttcctctggaagcttcttgaagacaaacaacgtctgtagcgaccctttgcaggcagcggaaccccccacctggcgacaggtgcctctgcggccaaaagccacgtgtataagatacacctgcaaaggcggcacaaccccagtgccacgttgtgagttggatagttgtggaaagagtcaaatggctctcctcaagcgtattcaacaaggggctgaaggatgcccagaaggtaccccattgtatgggatctgatctggggcctcggtacacatgctttacatgtgtttagtcgaggttaaaaaaacgtctaggccccccgaaccacggggacgtggttttcctttgaaaaacacgatgataatatggccacaacccatatgatggccttaccagtgaccgccttgctcctgccgctggccttgctgctccacgccgccaggccggacatccagctcacccagtccccgagctcgctgtccgcctccgtgggagatcgggtcaccatcacgtgccgcgccagccagtcgatttcctcctacctgaactggtaccaacagaagcccggaaaagccccgaagcttctcatctacgccgcctcgagcctgcagtcaggagtgccctcacggttctccggctccggttccggtactgatttcaccctgaccatttcctccctgcaaccggaggacttcgctacttactactgccagcagtcgtactccaccccctacactttcggacaaggcaccaaggtcgaaatcaagggtggcggtggctcgggcggtggtgggtcgggtggcggcggatctgaagtgcaattggtggaatcagggggaggacttgtgcagcctggaggatcgctgagactgtcatgtgccgtgtccggctttgccctgtccaaccacgggatgtcctgggtccgccgcgcgcctggaaagggcctcgaatgggtgtcgggtattgtgtacagcggtagcacctactatgccgcatccgtgaaggggagattcaccatcagccgggacaactccaggaacactctgtacctccaaatgaattcgctgaggccagaggacactgccatctactactgctccgcgcatggcggagagtccgacgtctggggacaggggaccaccgtgaccgtgtctagcaccacgacgccagcgccgcgaccaccaacaccggcgcccaccatcgcgtcgcagcccctgtccctgcgcccagaggcgtgccggccagcggcggggggcgcagtgcacacgagggggctggacttcgcctgtgatatctacatctgggcgcccttggccgggacttgtggggtccttctcctgtcactggttatcaccaaacggggcagaaagaaactcctgtatatattcaaacaaccatttatgagaccagtacaaactactcaagaggaagatggctgtagctgccgatttccagaagaagaagaaggaggatgtgaactgagagtgaagttcagcaggagcgcagacgcccccgcgtacaagcagggccagaaccagctctataacgagctcaatctaggacgaagagaggagtacgatgttttggacaagaggcgtggccgggaccctgagatggggggaaagccgagaaggaagaaccctcaggaaggcctgtacaatgaactgcagaaagataagatggcggaggcctacagtgagattgggatgaaaggcgagcgccggaggggcaaggggcacgatggcctttaccagggtctcagtacagccaccaaggacacctacgacgcccttcacatgcaggccctgccccctcgctaa

SEQ ID NO: 253 - DNA, 3500 bp, Artificial Sequence
  Synthesized
atggccttaccagtgaccgccttgctcctgccgctggccttgctgctccacgccgccaggccggacatcgtgatgacccagtccccctccagcctgacagtgacagccggcgagaaggtgacaatgatctgtaagtccagccagagcctgctgaacagcggcgaccagaagaactacctgacctggtaccagcagaagcctggccagccccccaagctgctgatcttctgggccagcacaagggagagcggcgtgcccgacagattcacaggcagcggcagcggcaccgacttcacactgaccatttcctccgtgcaggccgaggacctcgccgtgtactactgccagaacgactactcctaccccctgacattcggcgccggcaccaaactggagctgaagggtggcggtggctcgggcggtggtgggtcgggtggcggcggatctcaggtgcagctccagcagtccgatgccgagctggtgaagcccggaagcagcgtcaagatcagctgtaaggcctccggctacaccttcacagaccacgccatccactgggtgaagcagaagcccgagcagggcctggagtggatcggccactttagccccggaaacaccgacatcaagtacaacgacaagttcaagggcaaggccaccctgaccgtggacaggagcagcagcaccgcctacatgcagctgaacagcctgacaagcgaggacagcgccgtgtacttctgcaagacctccaccttcttcttcgactactggggccagggaaccaccctgacagtgtccagcaccacgacgccagcgccgcgaccaccaacaccggcgcccaccatcgcgtcgcagcccctgtccctgcgcccagaggcgtgccggccagcggcggggggcgcagtgcacacgagggggctggacttcgcctgtgatatctacatctgggcgcccttggccgggacttgtggggtccttctcctgtcactggttatcaccaaacggggcagaaagaaactcctgtatatattcaaacaaccatttatgagaccagtacaaactactcaagaggaagatggctgtagctgccgatttccagaagaagaagaaggaggatgtgaactgagagtgaagttcagcaggagcgcagacgcccccgcgtacaagcagggccagaaccagctctataacgagctcaatctaggacgaagagaggagtacgatgttttggacaagaggcgtggccgggaccctgagatggggggaaagccgagaaggaagaaccctcaggaaggcctgtacaatgaactgcagaaagataagatggcggaggcctacagtgagattgggatgaaaggcgagcgccggaggggcaaggggcacgatggcctttaccagggtctcagtacagccaccaaggacacctacgacgcccttcacatgcaggccctgccccctcgctaatctagaggcgcgcccctctccctcccccccccctaacgttactggccgaagccgcttggaataaggccggtgtgcgtttgtctatatgttattttccaccatattgccgtcttttggcaatgtgagggcccggaaacctggccctgtcttcttgacgagcattcctaggggtctttcccctctcgccaaaggaatgcaaggtctgttgaatgtcgtgaaggaagcagttcctctggaagcttcttgaagacaaacaacgtctgtagcgaccctttgcaggcagcggaaccccccacctggcgacaggtgcctctgcggccaaaagccacgtgtataagatacacctgcaaaggcggcacaaccccagtgccacgttgtgagttggatagttgtggaaagagtcaaatggctctcctcaagcgtattcaacaaggggctgaaggatgcccagaaggtaccccattgtatgggatctgatctggggcctcggtacacatgctttacatgtgtttagtcgaggttaaaaaaacgtctaggccccccgaaccacggggacgtggttttcctttgaaaaacacgatgataatatggccacaacccatatgatggccttaccagtgaccgccttgctcctgccgctggccttgctgctccacgccgccaggccggacatccagctcacccagtccccgagctcgctgtccgcctccgtgggagatcgggtcaccatcacgtgccgcgccagccagtcgatttcctcctacctgaactggtaccaacagaagcccggaaaagccccgaagcttctcatctacgccgcctcgagcctgcagtcaggagtgccctcacggttctccggctccggttccggtactgatttcaccctgaccatttcctccctgcaaccggaggacttcgctacttactactgccagcagtcgtactccaccccctacactttcggacaaggcaccaaggtcgaaatcaagggtggcggtggctcgggcggtggtgggtcgggtggcggcggatctgaagtgcaattggtggaatcagggggaggacttgtgcagcctggaggatcgctgagactgtcatgtgccgtgtccggctttgccctgtccaaccacgggatgtcctgggtccgccgcgcgcctggaaagggcctcgaatgggtgtcgggtattgtgtacagcggtagcacctactatgccgcatccgtgaaggggagattcaccatcagccgggacaactccaggaacactctgtacctccaaatgaattcgctgaggccagaggacactgccatctactactgctccgcgcatggcggagagtccgacgtctggggacaggggaccaccgtgaccgtgtctagcaccacgacgccagcgccgcgaccaccaacaccggcgcccaccatcgcgtcgcagcccctgtccctgcgcccagaggcgtgccggccagcggcggggggcgcagtgcacacgagggggctggacttcgcctgtgatatctacatctgggcgcccttggccgggacttgtggggtccttctcctgtcactggttatcaccaaacggggcagaaagaaactcctgtatatattcaaacaaccatttatgagaccagtacaaactactcaagaggaagatggctgtagctgccgatttccagaagaagaagaaggaggatgtgaactgagagtgaagttcagcaggagcgcagacgcccccgcgtacaagcagggccagaaccagctctataacgagctcaatctaggacgaagagaggagtacgatgttttggacaagaggcgtggccgggaccctgagatggggggaaagccgagaaggaagaaccctcaggaaggcctgtacaatgaactgcagaaagataagatggcggaggcctacagtgagattgggatgaaaggcgagcgccggaggggcaaggggcacgatggcctttaccagggtctcagtacagccaccaaggacacctacgacgcccttcacatgcaggccctgccccctcgctaa

SEQ ID NO: 254 - DNA, 3545 bp, Artificial Sequence
  Synthesized
atggccttaccagtgaccgccttgctcctgccgctggccttgctgctccacgccgccaggccggatattgtgatgacccagtccccgtcctccctgaccgtgaccgcgggcgaaaaagtgaccatgatttgcaaatcctcccagtccctgctgaattccggcgatcagaaaaattatctgacctggtatcagcagaaaccgggccagccgccgaaactgctgattttttgggcgtccacccgtgaatccggcgtgccggatcgttttaccggctccggctccggcaccgattttaccctgaccatttcctccgtgcaggcggaagatctggcggtgtattattgccagaatgattattcctatccgctgacctttggcgcgggcaccaaactggaactgaaaggcggcggcggctccggcggcggcggctccggcggcggcggctcccaggtgcagctgcagcagtccgatgcggaactggtgaaaccgggctcctccgtgaaaatttcctgcaaagcgtccggctatacctttaccgatcatgcgattcattgggtgaaacagaaaccggaacagggcctggaatggattggccatttttccccgggcaataccgatattaaatataatgataaatttaaaggcaaagcgaccctgaccgtggatcgttcctcctccaccgcgtatatgcagctgaattccctgacctccgaagattccgcggtgtatttttgcaaaacctccacctttttttttgattattggggccagggcaccaccctgaccgtgtcctccaccacgacgccagcgccgcgaccaccaacaccggcgcccaccatcgcgtcgcagcccctgtccctgcgcccagaggcgtgccggccagcggcggggggcgcagtgcacacgagggggctggacttcgcctgtgatatctacatctgggcgcccttggccgggacttgtggggtccttctcctgtcactggttatcaccctttactgcaaacggggcagaaagaaactcctgtatatattcaaacaaccatttatgagaccagtacaaactactcaagaggaagatggctgtagctgccgatttccagaagaagaagaaggaggatgtgaactgagagtgaagttcagcaggagcgcagacgcccccgcgtacaagcagggccagaaccagctctataacgagctcaatctaggacgaagagaggagtacgatgttttggacaagaggcgtggccgggaccctgagatggggggaaagccgagaaggaagaaccctcaggaaggcctgtacaatgaactgcagaaagataagatggcggaggcctacagtgagattgggatgaaaggcgagcgccggaggggcaaggggcacgatggcctttaccagggtctcagtacagccaccaaggacacctacgacgcccttcacatgcaggccctgccccctcgctaatctagaggcgcgcccctctccctcccccccccctaacgttactggccgaagccgcttggaataaggccggtgtgcgtttgtctatatgttattttccaccatattgccgtcttttggcaatgtgagggcccggaaacctggccctgtcttcttgacgagcattcctaggggtctttcccctctcgccaaaggaatgcaaggtctgttgaatgtcgtgaaggaagcagttcctctggaagcttcttgaagacaaacaacgtctgtagcgaccctttgcaggcagcggaaccccccacctggcgacaggtgcctctgcggccaaaagccacgtgtataagatacacctgcaaaggcggcacaaccccagtgccacgttgtgagttggatagttgtggaaagagtcaaatggctctcctcaagcgtattcaacaaggggctgaaggatgcccagaaggtaccccattgtatgggatctgatctggggcctcggtacacatgctttacatgtgtttagtcgaggttaaaaaaacgtctaggccccccgaaccacggggacgtggttttcctttgaaaaacacgatgataatatggccacaacccatatgatggccttaccagtgaccgccttgctcctgccgctggccttgctgctccacgccgccaggccggagatcgtgatgacccagtcccccctgtccctgcccgtgacccccggcgagcccgcctccatctcctgccggtcctcccagtccctgctgcactccaacggctacaactacctggactggtacctgcagaagcccggccagtccccccagctgctgatctacctgggctccaaccgggcctccggcgtgcccgaccggttctccggctccggctccggcaccgacttcaccctgaagatctcccgggtggaggccgaggacgtgggcgtgtactactgcatgcaggccctgcagacccccaccttcggccccggcaccaaggtggacatcaagggcggcggcggctccggcggcggcggctccggcggcggcggctcccaggtgcagctggtgcagtccggcggcggcgtggtgcagcccggcaagtccctgcggctgtcctgcgccgcctccggcttcaccttctccatcttcgccatgcactgggtgcggcaggcccccggcaagggcctggagtgggtggccaccatctcctacgacggctccaacgccttctacgccgactccgtggagggccggttcaccatctcccgggacaactccaaggactccctgtacctgcagatggactccctgcggcccgaggacaccgccgtgtactactgcgtgaaggccggcgacggcggctacgacgtgttcgactcctggggccagggcaccctggtgaccgtgtcctccaccacgacgccagcgccgcgaccaccaacaccggcgcccaccatcgcgtcgcagcccctgtccctgcgcccagaggcgtgccggccagcggcggggggcgcagtgcacacgagggggctggacttcgcctgtgatatctacatctgggcgcccttggccgggacttgtggggtccttctcctgtcactggttatcaccctttactgcaaacggggcagaaagaaactcctgtatatattcaaacaaccatttatgagaccagtacaaactactcaagaggaagatggctgtagctgccgatttccagaagaagaagaaggaggatgtgaactgagagtgaagttcagcaggagcgcagacgcccccgcgtacaagcagggccagaaccagctctataacgagctcaatctaggacgaagagaggagtacgatgttttggacaagaggcgtggccgggaccctgagatggggggaaagccgagaaggaagaaccctcaggaaggcctgtacaatgaactgcagaaagataagatggcggaggcctacagtgagattgggatgaaaggcgagcgccggaggggcaaggggcacgatggcctttaccagggtctcagtacagccaccaaggacacctacgacgcccttcacatgcaggccctgccccctcgctaa

SEQ ID NO: 255 - protein, 490 aa, Artificial Sequence
  Synthesized
MALPVTALLLPLALLLHAARPEIVMTQSPLSLPVTPGEPASISCRSSQSLLHSNGYNYLDWYLQKPGQSPQLLIYLGSNRASGVPDRFSGSGSGTDFTLKISRVEAEDVGVYYCMQALQTPTFGPGTKVDIKGGGGSGGGGSGGGGSQVQLVQSGGGVVQPGKSLRLSCAASGFTFSIFAMHWVRQAPGKGLEWVATISYDGSNAFYADSVEGRFTISRDNSKDSLYLQMDSLRPEDTAVYYCVKAGDGGYDVFDSWGQGTLVTVSSTTTPAPRPPTPAPTIASQPLSLRPEACRPAAGGAVHTRGLDFACDIYIWAPLAGTCGVLLLSLVITLYCKRGRKKLLYIFKQPFMRPVQTTQEEDGCSCRFPEEEEGGCELRVKFSRSADAPAYQQGQNQLYNELNLGRREEYDVLDKRRGRDPEMGGKPRRKNPQEGLYNELQKDKMAEAYSEIGMKGERRRGKGHDGLYQGLSTATKDTYDALHMQALPPR

SEQ ID NO: 256 - DNA, 3536 bp, Artificial Sequence
  Synthesized
atggccttaccagtgaccgccttgctcctgccgctggccttgctgctccacgccgccaggccggatattgtgatgacccagtccccgtcctccctgaccgtgaccgcgggcgaaaaagtgaccatgatttgcaaatcctcccagtccctgctgaattccggcgatcagaaaaattatctgacctggtatcagcagaaaccgggccagccgccgaaactgctgattttttgggcgtccacccgtgaatccggcgtgccggatcgttttaccggctccggctccggcaccgattttaccctgaccatttcctccgtgcaggcggaagatctggcggtgtattattgccagaatgattattcctatccgctgacctttggcgcgggcaccaaactggaactgaaaggcggcggcggctccggcggcggcggctccggcggcggcggctcccaggtgcagctgcagcagtccgatgcggaactggtgaaaccgggctcctccgtgaaaatttcctgcaaagcgtccggctatacctttaccgatcatgcgattcattgggtgaaacagaaaccggaacagggcctggaatggattggccatttttccccgggcaataccgatattaaatataatgataaatttaaaggcaaagcgaccctgaccgtggatcgttcctcctccaccgcgtatatgcagctgaattccctgacctccgaagattccgcggtgtatttttgcaaaacctccacctttttttttgattattggggccagggcaccaccctgaccgtgtcctccaccacgacgccagcgccgcgaccaccaacaccggcgcccaccatcgcgtcgcagcccctgtccctgcgcccagaggcgtgccggccagcggcggggggcgcagtgcacacgagggggctggacttcgcctgtgatatctacatctgggcgcccttggccgggacttgtggggtccttctcctgtcactggttatcaccaaacggggcagaaagaaactcctgtatatattcaaacaaccatttatgagaccagtacaaactactcaagaggaagatggctgtagctgccgatttccagaagaagaagaaggaggatgtgaactgagagtgaagttcagcaggagcgcagacgcccccgcgtacaagcagggccagaaccagctctataacgagctcaatctaggacgaagagaggagtacgatgttttggacaagaggcgtggccgggaccctgagatggggggaaagccgagaaggaagaaccctcaggaaggcctgtacaatgaactgcagaaagataagatggcggaggcctacagtgagattgggatgaaaggcgagcgccggaggggcaaggggcacgatggcctttaccagggtctcagtacagccaccaaggacacctacgacgcccttcacatgcaggccctgccccctcgctaatctagaggcgcgcccctctccctcccccccccctaacgttactggccgaagccgcttggaataaggccggtgtgcgtttgtctatatgttattttccaccatattgccgtcttttggcaatgtgagggcccggaaacctggccctgtcttcttgacgagcattcctaggggtctttcccctctcgccaaaggaatgcaaggtctgttgaatgtcgtgaaggaagcagttcctctggaagcttcttgaagacaaacaacgtctgtagcgaccctttgcaggcagcggaaccccccacctggcgacaggtgcctctgcggccaaaagccacgtgtataagatacacctgcaaaggcggcacaaccccagtgccacgttgtgagttggatagttgtggaaagagtcaaatggctctcctcaagcgtattcaacaaggggctgaaggatgcccagaaggtaccccattgtatgggatctgatctggggcctcggtacacatgctttacatgtgtttagtcgaggttaaaaaaacgtctaggccccccgaaccacggggacgtggttttcctttgaaaaacacgatgataatatggccacaacccatatgatggccttaccagtgaccgccttgctcctgccgctggccttgctgctccacgccgccaggccggagatcgtgatgacccagtcccccctgtccctgcccgtgacccccggcgagcccgcctccatctcctgccggtcctcccagtccctgctgcactccaacggctacaactacctggactggtacctgcagaagcccggccagtccccccagctgctgatctacctgggctccaaccgggcctccggcgtgcccgaccggttctccggctccggctccggcaccgacttcaccctgaagatctcccgggtggaggccgaggacgtgggcgtgtactactgcatgcaggccctgcagacccccaccttcggccccggcaccaaggtggacatcaagggcggcggcggctccggcggcggcggctccggcggcggcggctcccaggtgcagctggtgcagtccggcggcggcgtggtgcagcccggcaagtccctgcggctgtcctgcgccgcctccggcttcaccttctccatcttcgccatgcactgggtgcggcaggcccccggcaagggcctggagtgggtggccaccatctcctacgacggctccaacgccttctacgccgactccgtggagggccggttcaccatctcccgggacaactccaaggactccctgtacctgcagatggactccctgcggcccgaggacaccgccgtgtactactgcgtgaaggccggcgacggcggctacgacgtgttcgactcctggggccagggcaccctggtgaccgtgtcctccaccacgacgccagcgccgcgaccaccaacaccggcgcccaccatcgcgtcgcagcccctgtccctgcgcccagaggcgtgccggccagcggcggggggcgcagtgcacacgagggggctggacttcgcctgtgatatctacatctgggcgcccttggccgggacttgtggggtccttctcctgtcactggttatcaccctttactgcaaacggggcagaaagaaactcctgtatatattcaaacaaccatttatgagaccagtacaaactactcaagaggaagatggctgtagctgccgatttccagaagaagaagaaggaggatgtgaactgagagtgaagttcagcaggagcgcagacgcccccgcgtacaagcagggccagaaccagctctataacgagctcaatctaggacgaagagaggagtacgatgttttggacaagaggcgtggccgggaccctgagatggggggaaagccgagaaggaagaaccctcaggaaggcctgtacaatgaactgcagaaagataagatggcggaggcctacagtgagattgggatgaaaggcgagcgccggaggggcaaggggcacgatggcctttaccagggtctcagtacagccaccaaggacacctacgacgcccttcacatgcaggccctgccccctcgctaa

SEQ ID NO: 257 - DNA, 3536 bp, Artificial Sequence
  Synthesized
atggccttaccagtgaccgccttgctcctgccgctggccttgctgctccacgccgccaggccggatattgtgatgacccagtccccgtcctccctgaccgtgaccgcgggcgaaaaagtgaccatgatttgcaaatcctcccagtccctgctgaattccggcgatcagaaaaattatctgacctggtatcagcagaaaccgggccagccgccgaaactgctgattttttgggcgtccacccgtgaatccggcgtgccggatcgttttaccggctccggctccggcaccgattttaccctgaccatttcctccgtgcaggcggaagatctggcggtgtattattgccagaatgattattcctatccgctgacctttggcgcgggcaccaaactggaactgaaaggcggcggcggctccggcggcggcggctccggcggcggcggctcccaggtgcagctgcagcagtccgatgcggaactggtgaaaccgggctcctccgtgaaaatttcctgcaaagcgtccggctatacctttaccgatcatgcgattcattgggtgaaacagaaaccggaacagggcctggaatggattggccatttttccccgggcaataccgatattaaatataatgataaatttaaaggcaaagcgaccctgaccgtggatcgttcctcctccaccgcgtatatgcagctgaattccctgacctccgaagattccgcggtgtatttttgcaaaacctccacctttttttttgattattggggccagggcaccaccctgaccgtgtcctccaccacgacgccagcgccgcgaccaccaacaccggcgcccaccatcgcgtcgcagcccctgtccctgcgcccagaggcgtgccggccagcggcggggggcgcagtgcacacgagggggctggacttcgcctgtgatatctacatctgggcgcccttggccgggacttgtggggtccttctcctgtcactggttatcaccctttactgcaaacggggcagaaagaaactcctgtatatattcaaacaaccatttatgagaccagtacaaactactcaagaggaagatggctgtagctgccgatttccagaagaagaagaaggaggatgtgaactgagagtgaagttcagcaggagcgcagacgcccccgcgtacaagcagggccagaaccagctctataacgagctcaatctaggacgaagagaggagtacgatgttttggacaagaggcgtggccgggaccctgagatggggggaaagccgagaaggaagaaccctcaggaaggcctgtacaatgaactgcagaaagataagatggcggaggcctacagtgagattgggatgaaaggcgagcgccggaggggcaaggggcacgatggcctttaccagggtctcagtacagccaccaaggacacctacgacgcccttcacatgcaggccctgccccctcgctaatctagaggcgcgcccctctccctcccccccccctaacgttactggccgaagccgcttggaataaggccggtgtgcgtttgtctatatgttattttccaccatattgccgtcttttggcaatgtgagggcccggaaacctggccctgtcttcttgacgagcattcctaggggtctttcccctctcgccaaaggaatgcaaggtctgttgaatgtcgtgaaggaagcagttcctctggaagcttcttgaagacaaacaacgtctgtagcgaccctttgcaggcagcggaaccccccacctggcgacaggtgcctctgcggccaaaagccacgtgtataagatacacctgcaaaggcggcacaaccccagtgccacgttgtgagttggatagttgtggaaagagtcaaatggctctcctcaagcgtattcaacaaggggctgaaggatgcccagaaggtaccccattgtatgggatctgatctggggcctcggtacacatgctttacatgtgtttagtcgaggttaaaaaaacgtctaggccccccgaaccacggggacgtggttttcctttgaaaaacacgatgataatatggccacaacccatatgatggccttaccagtgaccgccttgctcctgccgctggccttgctgctccacgccgccaggccggagatcgtgatgacccagtcccccctgtccctgcccgtgacccccggcgagcccgcctccatctcctgccggtcctcccagtccctgctgcactccaacggctacaactacctggactggtacctgcagaagcccggccagtccccccagctgctgatctacctgggctccaaccgggcctccggcgtgcccgaccggttctccggctccggctccggcaccgacttcaccctgaagatctcccgggtggaggccgaggacgtgggcgtgtactactgcatgcaggccctgcagacccccaccttcggccccggcaccaaggtggacatcaagggcggcggcggctccggcggcggcggctccggcggcggcggctcccaggtgcagctggtgcagtccggcggcggcgtggtgcagcccggcaagtccctgcggctgtcctgcgccgcctccggcttcaccttctccatcttcgccatgcactgggtgcggcaggcccccggcaagggcctggagtgggtggccaccatctcctacgacggctccaacgccttctacgccgactccgtggagggccggttcaccatctcccgggacaactccaaggactccctgtacctgcagatggactccctgcggcccgaggacaccgccgtgtactactgcgtgaaggccggcgacggcggctacgacgtgttcgactcctggggccagggcaccctggtgaccgtgtcctccaccacgacgccagcgccgcgaccaccaacaccggcgcccaccatcgcgtcgcagcccctgtccctgcgcccagaggcgtgccggccagcggcggggggcgcagtgcacacgagggggctggacttcgcctgtgatatctacatctgggcgcccttggccgggacttgtggggtccttctcctgtcactggttatcaccaaacggggcagaaagaaactcctgtatatattcaaacaaccatttatgagaccagtacaaactactcaagaggaagatggctgtagctgccgatttccagaagaagaagaaggaggatgtgaactgagagtgaagttcagcaggagcgcagacgcccccgcgtacaagcagggccagaaccagctctataacgagctcaatctaggacgaagagaggagtacgatgttttggacaagaggcgtggccgggaccctgagatggggggaaagccgagaaggaagaaccctcaggaaggcctgtacaatgaactgcagaaagataagatggcggaggcctacagtgagattgggatgaaaggcgagcgccggaggggcaaggggcacgatggcctttaccagggtctcagtacagccaccaaggacacctacgacgcccttcacatgcaggccctgccccctcgctaa

SEQ ID NO: 258 - protein, 487 aa, Artificial Sequence
  Synthesized
MALPVTALLLPLALLLHAARPEIVMTQSPLSLPVTPGEPASISCRSSQSLLHSNGYNYLDWYLQKPGQSPQLLIYLGSNRASGVPDRFSGSGSGTDFTLKISRVEAEDVGVYYCMQALQTPTFGPGTKVDIKGGGGSGGGGSGGGGSQVQLVQSGGGVVQPGKSLRLSCAASGFTFSIFAMHWVRQAPGKGLEWVATISYDGSNAFYADSVEGRFTISRDNSKDSLYLQMDSLRPEDTAVYYCVKAGDGGYDVFDSWGQGTLVTVSSTTTPAPRPPTPAPTIASQPLSLRPEACRPAAGGAVHTRGLDFACDIYIWAPLAGTCGVLLLSLVITKRGRKKLLYIFKQPFMRPVQTTQEEDGCSCRFPEEEEGGCELRVKFSRSADAPAYQQGQNQLYNELNLGRREEYDVLDKRRGRDPEMGGKPRRKNPQEGLYNELQKDKMAEAYSEIGMKGERRRGKGHDGLYQGLSTATKDTYDALHMQALPPR

SEQ ID NO: 259 - DNA, 3527 bp, Artificial Sequence
  Synthesized
atggccttaccagtgaccgccttgctcctgccgctggccttgctgctccacgccgccaggccggatattgtgatgacccagtccccgtcctccctgaccgtgaccgcgggcgaaaaagtgaccatgatttgcaaatcctcccagtccctgctgaattccggcgatcagaaaaattatctgacctggtatcagcagaaaccgggccagccgccgaaactgctgattttttgggcgtccacccgtgaatccggcgtgccggatcgttttaccggctccggctccggcaccgattttaccctgaccatttcctccgtgcaggcggaagatctggcggtgtattattgccagaatgattattcctatccgctgacctttggcgcgggcaccaaactggaactgaaaggcggcggcggctccggcggcggcggctccggcggcggcggctcccaggtgcagctgcagcagtccgatgcggaactggtgaaaccgggctcctccgtgaaaatttcctgcaaagcgtccggctatacctttaccgatcatgcgattcattgggtgaaacagaaaccggaacagggcctggaatggattggccatttttccccgggcaataccgatattaaatataatgataaatttaaaggcaaagcgaccctgaccgtggatcgttcctcctccaccgcgtatatgcagctgaattccctgacctccgaagattccgcggtgtatttttgcaaaacctccacctttttttttgattattggggccagggcaccaccctgaccgtgtcctccaccacgacgccagcgccgcgaccaccaacaccggcgcccaccatcgcgtcgcagcccctgtccctgcgcccagaggcgtgccggccagcggcggggggcgcagtgcacacgagggggctggacttcgcctgtgatatctacatctgggcgcccttggccgggacttgtggggtccttctcctgtcactggttatcaccaaacggggcagaaagaaactcctgtatatattcaaacaaccatttatgagaccagtacaaactactcaagaggaagatggctgtagctgccgatttccagaagaagaagaaggaggatgtgaactgagagtgaagttcagcaggagcgcagacgcccccgcgtacaagcagggccagaaccagctctataacgagctcaatctaggacgaagagaggagtacgatgttttggacaagaggcgtggccgggaccctgagatggggggaaagccgagaaggaagaaccctcaggaaggcctgtacaatgaactgcagaaagataagatggcggaggcctacagtgagattgggatgaaaggcgagcgccggaggggcaaggggcacgatggcctttaccagggtctcagtacagccaccaaggacacctacgacgcccttcacatgcaggccctgccccctcgctaatctagaggcgcgcccctctccctcccccccccctaacgttactggccgaagccgcttggaataaggccggtgtgcgtttgtctatatgttattttccaccatattgccgtcttttggcaatgtgagggcccggaaacctggccctgtcttcttgacgagcattcctaggggtctttcccctctcgccaaaggaatgcaaggtctgttgaatgtcgtgaaggaagcagttcctctggaagcttcttgaagacaaacaacgtctgtagcgaccctttgcaggcagcggaaccccccacctggcgacaggtgcctctgcggccaaaagccacgtgtataagatacacctgcaaaggcggcacaaccccagtgccacgttgtgagttggatagttgtggaaagagtcaaatggctctcctcaagcgtattcaacaaggggctgaaggatgcccagaaggtaccccattgtatgggatctgatctggggcctcggtacacatgctttacatgtgtttagtcgaggttaaaaaaacgtctaggccccccgaaccacggggacgtggttttcctttgaaaaacacgatgataatatggccacaacccatatgatggccttaccagtgaccgccttgctcctgccgctggccttgctgctccacgccgccaggccggagatcgtgatgacccagtcccccctgtccctgcccgtgacccccggcgagcccgcctccatctcctgccggtcctcccagtccctgctgcactccaacggctacaactacctggactggtacctgcagaagcccggccagtccccccagctgctgatctacctgggctccaaccgggcctccggcgtgcccgaccggttctccggctccggctccggcaccgacttcaccctgaagatctcccgggtggaggccgaggacgtgggcgtgtactactgcatgcaggccctgcagacccccaccttcggccccggcaccaaggtggacatcaagggcggcggcggctccggcggcggcggctccggcggcggcggctcccaggtgcagctggtgcagtccggcggcggcgtggtgcagcccggcaagtccctgcggctgtcctgcgccgcctccggcttcaccttctccatcttcgccatgcactgggtgcggcaggcccccggcaagggcctggagtgggtggccaccatctcctacgacggctccaacgccttctacgccgactccgtggagggccggttcaccatctcccgggacaactccaaggactccctgtacctgcagatggactccctgcggcccgaggacaccgccgtgtactactgcgtgaaggccggcgacggcggctacgacgtgttcgactcctggggccagggcaccctggtgaccgtgtcctccaccacgacgccagcgccgcgaccaccaacaccggcgcccaccatcgcgtcgcagcccctgtccctgcgcccagaggcgtgccggccagcggcggggggcgcagtgcacacgagggggctggacttcgcctgtgatatctacatctgggcgcccttggccgggacttgtggggtccttctcctgtcactggttatcaccaaacggggcagaaagaaactcctgtatatattcaaacaaccatttatgagaccagtacaaactactcaagaggaagatggctgtagctgccgatttccagaagaagaagaaggaggatgtgaactgagagtgaagttcagcaggagcgcagacgcccccgcgtacaagcagggccagaaccagctctataacgagctcaatctaggacgaagagaggagtacgatgttttggacaagaggcgtggccgggaccctgagatggggggaaagccgagaaggaagaaccctcaggaaggcctgtacaatgaactgcagaaagataagatggcggaggcctacagtgagattgggatgaaaggcgagcgccggaggggcaaggggcacgatggcctttaccagggtctcagtacagccaccaaggacacctacgacgcccttcacatgcaggccctgccccctcgctaa

SEQ ID NO: 260 - DNA, 3545 bp, Artificial Sequence
  Synthesized
atggccttaccagtgaccgccttgctcctgccgctggccttgctgctccacgccgccaggccggacatcgtgatgacccagtccccctccagcctgacagtgacagccggcgagaaggtgacaatgatctgtaagtccagccagagcctgctgaacagcggcgaccagaagaactacctgacctggtaccagcagaagcctggccagccccccaagctgctgatcttctgggccagcacaagggagagcggcgtgcccgacagattcacaggcagcggcagcggcaccgacttcacactgaccatttcctccgtgcaggccgaggacctcgccgtgtactactgccagaacgactactcctaccccctgacattcggcgccggcaccaaactggagctgaagggtggcggtggctcgggcggtggtgggtcgggtggcggcggatctcaggtgcagctccagcagtccgatgccgagctggtgaagcccggaagcagcgtcaagatcagctgtaaggcctccggctacaccttcacagaccacgccatccactgggtgaagcagaagcccgagcagggcctggagtggatcggccactttagccccggaaacaccgacatcaagtacaacgacaagttcaagggcaaggccaccctgaccgtggacaggagcagcagcaccgcctacatgcagctgaacagcctgacaagcgaggacagcgccgtgtacttctgcaagacctccaccttcttcttcgactactggggccagggaaccaccctgacagtgtccagcaccacgacgccagcgccgcgaccaccaacaccggcgcccaccatcgcgtcgcagcccctgtccctgcgcccagaggcgtgccggccagcggcggggggcgcagtgcacacgagggggctggacttcgcctgtgatatctacatctgggcgcccttggccgggacttgtggggtccttctcctgtcactggttatcaccctttactgcaaacggggcagaaagaaactcctgtatatattcaaacaaccatttatgagaccagtacaaactactcaagaggaagatggctgtagctgccgatttccagaagaagaagaaggaggatgtgaactgagagtgaagttcagcaggagcgcagacgcccccgcgtacaagcagggccagaaccagctctataacgagctcaatctaggacgaagagaggagtacgatgttttggacaagaggcgtggccgggaccctgagatggggggaaagccgagaaggaagaaccctcaggaaggcctgtacaatgaactgcagaaagataagatggcggaggcctacagtgagattgggatgaaaggcgagcgccggaggggcaaggggcacgatggcctttaccagggtctcagtacagccaccaaggacacctacgacgcccttcacatgcaggccctgccccctcgctaatctagaggcgcgcccctctccctcccccccccctaacgttactggccgaagccgcttggaataaggccggtgtgcgtttgtctatatgttattttccaccatattgccgtcttttggcaatgtgagggcccggaaacctggccctgtcttcttgacgagcattcctaggggtctttcccctctcgccaaaggaatgcaaggtctgttgaatgtcgtgaaggaagcagttcctctggaagcttcttgaagacaaacaacgtctgtagcgaccctttgcaggcagcggaaccccccacctggcgacaggtgcctctgcggccaaaagccacgtgtataagatacacctgcaaaggcggcacaaccccagtgccacgttgtgagttggatagttgtggaaagagtcaaatggctctcctcaagcgtattcaacaaggggctgaaggatgcccagaaggtaccccattgtatgggatctgatctggggcctcggtacacatgctttacatgtgtttagtcgaggttaaaaaaacgtctaggccccccgaaccacggggacgtggttttcctttgaaaaacacgatgataatatggccacaacccatatgatggccttaccagtgaccgccttgctcctgccgctggccttgctgctccacgccgccaggccggagatcgtgatgacccagtcccccctgtccctgcccgtgacccccggcgagcccgcctccatctcctgccggtcctcccagtccctgctgcactccaacggctacaactacctggactggtacctgcagaagcccggccagtccccccagctgctgatctacctgggctccaaccgggcctccggcgtgcccgaccggttctccggctccggctccggcaccgacttcaccctgaagatctcccgggtggaggccgaggacgtgggcgtgtactactgcatgcaggccctgcagacccccaccttcggccccggcaccaaggtggacatcaagggcggcggcggctccggcggcggcggctccggcggcggcggctcccaggtgcagctggtgcagtccggcggcggcgtggtgcagcccggcaagtccctgcggctgtcctgcgccgcctccggcttcaccttctccatcttcgccatgcactgggtgcggcaggcccccggcaagggcctggagtgggtggccaccatctcctacgacggctccaacgccttctacgccgactccgtggagggccggttcaccatctcccgggacaactccaaggactccctgtacctgcagatggactccctgcggcccgaggacaccgccgtgtactactgcgtgaaggccggcgacggcggctacgacgtgttcgactcctggggccagggcaccctggtgaccgtgtcctccaccacgacgccagcgccgcgaccaccaacaccggcgcccaccatcgcgtcgcagcccctgtccctgcgcccagaggcgtgccggccagcggcggggggcgcagtgcacacgagggggctggacttcgcctgtgatatctacatctgggcgcccttggccgggacttgtggggtccttctcctgtcactggttatcaccctttactgcaaacggggcagaaagaaactcctgtatatattcaaacaaccatttatgagaccagtacaaactactcaagaggaagatggctgtagctgccgatttccagaagaagaagaaggaggatgtgaactgagagtgaagttcagcaggagcgcagacgcccccgcgtacaagcagggccagaaccagctctataacgagctcaatctaggacgaagagaggagtacgatgttttggacaagaggcgtggccgggaccctgagatggggggaaagccgagaaggaagaaccctcaggaaggcctgtacaatgaactgcagaaagataagatggcggaggcctacagtgagattgggatgaaaggcgagcgccggaggggcaaggggcacgatggcctttaccagggtctcagtacagccaccaaggacacctacgacgcccttcacatgcaggccctgccccctcgctaa

SEQ ID NO: 261 - DNA, 3536 bp, Artificial Sequence
  Synthesized
atggccttaccagtgaccgccttgctcctgccgctggccttgctgctccacgccgccaggccggacatcgtgatgacccagtccccctccagcctgacagtgacagccggcgagaaggtgacaatgatctgtaagtccagccagagcctgctgaacagcggcgaccagaagaactacctgacctggtaccagcagaagcctggccagccccccaagctgctgatcttctgggccagcacaagggagagcggcgtgcccgacagattcacaggcagcggcagcggcaccgacttcacactgaccatttcctccgtgcaggccgaggacctcgccgtgtactactgccagaacgactactcctaccccctgacattcggcgccggcaccaaactggagctgaagggtggcggtggctcgggcggtggtgggtcgggtggcggcggatctcaggtgcagctccagcagtccgatgccgagctggtgaagcccggaagcagcgtcaagatcagctgtaaggcctccggctacaccttcacagaccacgccatccactgggtgaagcagaagcccgagcagggcctggagtggatcggccactttagccccggaaacaccgacatcaagtacaacgacaagttcaagggcaaggccaccctgaccgtggacaggagcagcagcaccgcctacatgcagctgaacagcctgacaagcgaggacagcgccgtgtacttctgcaagacctccaccttcttcttcgactactggggccagggaaccaccctgacagtgtccagcaccacgacgccagcgccgcgaccaccaacaccggcgcccaccatcgcgtcgcagcccctgtccctgcgcccagaggcgtgccggccagcggcggggggcgcagtgcacacgagggggctggacttcgcctgtgatatctacatctgggcgcccttggccgggacttgtggggtccttctcctgtcactggttatcaccaaacggggcagaaagaaactcctgtatatattcaaacaaccatttatgagaccagtacaaactactcaagaggaagatggctgtagctgccgatttccagaagaagaagaaggaggatgtgaactgagagtgaagttcagcaggagcgcagacgcccccgcgtacaagcagggccagaaccagctctataacgagctcaatctaggacgaagagaggagtacgatgttttggacaagaggcgtggccgggaccctgagatggggggaaagccgagaaggaagaaccctcaggaaggcctgtacaatgaactgcagaaagataagatggcggaggcctacagtgagattgggatgaaaggcgagcgccggaggggcaaggggcacgatggcctttaccagggtctcagtacagccaccaaggacacctacgacgcccttcacatgcaggccctgccccctcgctaatctagaggcgcgcccctctccctcccccccccctaacgttactggccgaagccgcttggaataaggccggtgtgcgtttgtctatatgttattttccaccatattgccgtcttttggcaatgtgagggcccggaaacctggccctgtcttcttgacgagcattcctaggggtctttcccctctcgccaaaggaatgcaaggtctgttgaatgtcgtgaaggaagcagttcctctggaagcttcttgaagacaaacaacgtctgtagcgaccctttgcaggcagcggaaccccccacctggcgacaggtgcctctgcggccaaaagccacgtgtataagatacacctgcaaaggcggcacaaccccagtgccacgttgtgagttggatagttgtggaaagagtcaaatggctctcctcaagcgtattcaacaaggggctgaaggatgcccagaaggtaccccattgtatgggatctgatctggggcctcggtacacatgctttacatgtgtttagtcgaggttaaaaaaacgtctaggccccccgaaccacggggacgtggttttcctttgaaaaacacgatgataatatggccacaacccatatgatggccttaccagtgaccgccttgctcctgccgctggccttgctgctccacgccgccaggccggagatcgtgatgacccagtcccccctgtccctgcccgtgacccccggcgagcccgcctccatctcctgccggtcctcccagtccctgctgcactccaacggctacaactacctggactggtacctgcagaagcccggccagtccccccagctgctgatctacctgggctccaaccgggcctccggcgtgcccgaccggttctccggctccggctccggcaccgacttcaccctgaagatctcccgggtggaggccgaggacgtgggcgtgtactactgcatgcaggccctgcagacccccaccttcggccccggcaccaaggtggacatcaagggcggcggcggctccggcggcggcggctccggcggcggcggctcccaggtgcagctggtgcagtccggcggcggcgtggtgcagcccggcaagtccctgcggctgtcctgcgccgcctccggcttcaccttctccatcttcgccatgcactgggtgcggcaggcccccggcaagggcctggagtgggtggccaccatctcctacgacggctccaacgccttctacgccgactccgtggagggccggttcaccatctcccgggacaactccaaggactccctgtacctgcagatggactccctgcggcccgaggacaccgccgtgtactactgcgtgaaggccggcgacggcggctacgacgtgttcgactcctggggccagggcaccctggtgaccgtgtcctccaccacgacgccagcgccgcgaccaccaacaccggcgcccaccatcgcgtcgcagcccctgtccctgcgcccagaggcgtgccggccagcggcggggggcgcagtgcacacgagggggctggacttcgcctgtgatatctacatctgggcgcccttggccgggacttgtggggtccttctcctgtcactggttatcaccctttactgcaaacggggcagaaagaaactcctgtatatattcaaacaaccatttatgagaccagtacaaactactcaagaggaagatggctgtagctgccgatttccagaagaagaagaaggaggatgtgaactgagagtgaagttcagcaggagcgcagacgcccccgcgtacaagcagggccagaaccagctctataacgagctcaatctaggacgaagagaggagtacgatgttttggacaagaggcgtggccgggaccctgagatggggggaaagccgagaaggaagaaccctcaggaaggcctgtacaatgaactgcagaaagataagatggcggaggcctacagtgagattgggatgaaaggcgagcgccggaggggcaaggggcacgatggcctttaccagggtctcagtacagccaccaaggacacctacgacgcccttcacatgcaggccctgccccctcgctaa

SEQ ID NO: 262 - DNA, 3536 bp, Artificial Sequence
  Synthesized
atggccttaccagtgaccgccttgctcctgccgctggccttgctgctccacgccgccaggccggacatcgtgatgacccagtccccctccagcctgacagtgacagccggcgagaaggtgacaatgatctgtaagtccagccagagcctgctgaacagcggcgaccagaagaactacctgacctggtaccagcagaagcctggccagccccccaagctgctgatcttctgggccagcacaagggagagcggcgtgcccgacagattcacaggcagcggcagcggcaccgacttcacactgaccatttcctccgtgcaggccgaggacctcgccgtgtactactgccagaacgactactcctaccccctgacattcggcgccggcaccaaactggagctgaagggtggcggtggctcgggcggtggtgggtcgggtggcggcggatctcaggtgcagctccagcagtccgatgccgagctggtgaagcccggaagcagcgtcaagatcagctgtaaggcctccggctacaccttcacagaccacgccatccactgggtgaagcagaagcccgagcagggcctggagtggatcggccactttagccccggaaacaccgacatcaagtacaacgacaagttcaagggcaaggccaccctgaccgtggacaggagcagcagcaccgcctacatgcagctgaacagcctgacaagcgaggacagcgccgtgtacttctgcaagacctccaccttcttcttcgactactggggccagggaaccaccctgacagtgtccagcaccacgacgccagcgccgcgaccaccaacaccggcgcccaccatcgcgtcgcagcccctgtccctgcgcccagaggcgtgccggccagcggcggggggcgcagtgcacacgagggggctggacttcgcctgtgatatctacatctgggcgcccttggccgggacttgtggggtccttctcctgtcactggttatcaccctttactgcaaacggggcagaaagaaactcctgtatatattcaaacaaccatttatgagaccagtacaaactactcaagaggaagatggctgtagctgccgatttccagaagaagaagaaggaggatgtgaactgagagtgaagttcagcaggagcgcagacgcccccgcgtacaagcagggccagaaccagctctataacgagctcaatctaggacgaagagaggagtacgatgttttggacaagaggcgtggccgggaccctgagatggggggaaagccgagaaggaagaaccctcaggaaggcctgtacaatgaactgcagaaagataagatggcggaggcctacagtgagattgggatgaaaggcgagcgccggaggggcaaggggcacgatggcctttaccagggtctcagtacagccaccaaggacacctacgacgcccttcacatgcaggccctgccccctcgctaatctagaggcgcgcccctctccctcccccccccctaacgttactggccgaagccgcttggaataaggccggtgtgcgtttgtctatatgttattttccaccatattgccgtcttttggcaatgtgagggcccggaaacctggccctgtcttcttgacgagcattcctaggggtctttcccctctcgccaaaggaatgcaaggtctgttgaatgtcgtgaaggaagcagttcctctggaagcttcttgaagacaaacaacgtctgtagcgaccctttgcaggcagcggaaccccccacctggcgacaggtgcctctgcggccaaaagccacgtgtataagatacacctgcaaaggcggcacaaccccagtgccacgttgtgagttggatagttgtggaaagagtcaaatggctctcctcaagcgtattcaacaaggggctgaaggatgcccagaaggtaccccattgtatgggatctgatctggggcctcggtacacatgctttacatgtgtttagtcgaggttaaaaaaacgtctaggccccccgaaccacggggacgtggttttcctttgaaaaacacgatgataatatggccacaacccatatgatggccttaccagtgaccgccttgctcctgccgctggccttgctgctccacgccgccaggccggagatcgtgatgacccagtcccccctgtccctgcccgtgacccccggcgagcccgcctccatctcctgccggtcctcccagtccctgctgcactccaacggctacaactacctggactggtacctgcagaagcccggccagtccccccagctgctgatctacctgggctccaaccgggcctccggcgtgcccgaccggttctccggctccggctccggcaccgacttcaccctgaagatctcccgggtggaggccgaggacgtgggcgtgtactactgcatgcaggccctgcagacccccaccttcggccccggcaccaaggtggacatcaagggcggcggcggctccggcggcggcggctccggcggcggcggctcccaggtgcagctggtgcagtccggcggcggcgtggtgcagcccggcaagtccctgcggctgtcctgcgccgcctccggcttcaccttctccatcttcgccatgcactgggtgcggcaggcccccggcaagggcctggagtgggtggccaccatctcctacgacggctccaacgccttctacgccgactccgtggagggccggttcaccatctcccgggacaactccaaggactccctgtacctgcagatggactccctgcggcccgaggacaccgccgtgtactactgcgtgaaggccggcgacggcggctacgacgtgttcgactcctggggccagggcaccctggtgaccgtgtcctccaccacgacgccagcgccgcgaccaccaacaccggcgcccaccatcgcgtcgcagcccctgtccctgcgcccagaggcgtgccggccagcggcggggggcgcagtgcacacgagggggctggacttcgcctgtgatatctacatctgggcgcccttggccgggacttgtggggtccttctcctgtcactggttatcaccaaacggggcagaaagaaactcctgtatatattcaaacaaccatttatgagaccagtacaaactactcaagaggaagatggctgtagctgccgatttccagaagaagaagaaggaggatgtgaactgagagtgaagttcagcaggagcgcagacgcccccgcgtacaagcagggccagaaccagctctataacgagctcaatctaggacgaagagaggagtacgatgttttggacaagaggcgtggccgggaccctgagatggggggaaagccgagaaggaagaaccctcaggaaggcctgtacaatgaactgcagaaagataagatggcggaggcctacagtgagattgggatgaaaggcgagcgccggaggggcaaggggcacgatggcctttaccagggtctcagtacagccaccaaggacacctacgacgcccttcacatgcaggccctgccccctcgctaa

SEQ ID NO: 263 - DNA, 3527 bp, Artificial Sequence
  Synthesized
atggccttaccagtgaccgccttgctcctgccgctggccttgctgctccacgccgccaggccggacatcgtgatgacccagtccccctccagcctgacagtgacagccggcgagaaggtgacaatgatctgtaagtccagccagagcctgctgaacagcggcgaccagaagaactacctgacctggtaccagcagaagcctggccagccccccaagctgctgatcttctgggccagcacaagggagagcggcgtgcccgacagattcacaggcagcggcagcggcaccgacttcacactgaccatttcctccgtgcaggccgaggacctcgccgtgtactactgccagaacgactactcctaccccctgacattcggcgccggcaccaaactggagctgaagggtggcggtggctcgggcggtggtgggtcgggtggcggcggatctcaggtgcagctccagcagtccgatgccgagctggtgaagcccggaagcagcgtcaagatcagctgtaaggcctccggctacaccttcacagaccacgccatccactgggtgaagcagaagcccgagcagggcctggagtggatcggccactttagccccggaaacaccgacatcaagtacaacgacaagttcaagggcaaggccaccctgaccgtggacaggagcagcagcaccgcctacatgcagctgaacagcctgacaagcgaggacagcgccgtgtacttctgcaagacctccaccttcttcttcgactactggggccagggaaccaccctgacagtgtccagcaccacgacgccagcgccgcgaccaccaacaccggcgcccaccatcgcgtcgcagcccctgtccctgcgcccagaggcgtgccggccagcggcggggggcgcagtgcacacgagggggctggacttcgcctgtgatatctacatctgggcgcccttggccgggacttgtggggtccttctcctgtcactggttatcaccaaacggggcagaaagaaactcctgtatatattcaaacaaccatttatgagaccagtacaaactactcaagaggaagatggctgtagctgccgatttccagaagaagaagaaggaggatgtgaactgagagtgaagttcagcaggagcgcagacgcccccgcgtacaagcagggccagaaccagctctataacgagctcaatctaggacgaagagaggagtacgatgttttggacaagaggcgtggccgggaccctgagatggggggaaagccgagaaggaagaaccctcaggaaggcctgtacaatgaactgcagaaagataagatggcggaggcctacagtgagattgggatgaaaggcgagcgccggaggggcaaggggcacgatggcctttaccagggtctcagtacagccaccaaggacacctacgacgcccttcacatgcaggccctgccccctcgctaatctagaggcgcgcccctctccctcccccccccctaacgttactggccgaagccgcttggaataaggccggtgtgcgtttgtctatatgttattttccaccatattgccgtcttttggcaatgtgagggcccggaaacctggccctgtcttcttgacgagcattcctaggggtctttcccctctcgccaaaggaatgcaaggtctgttgaatgtcgtgaaggaagcagttcctctggaagcttcttgaagacaaacaacgtctgtagcgaccctttgcaggcagcggaaccccccacctggcgacaggtgcctctgcggccaaaagccacgtgtataagatacacctgcaaaggcggcacaaccccagtgccacgttgtgagttggatagttgtggaaagagtcaaatggctctcctcaagcgtattcaacaaggggctgaaggatgcccagaaggtaccccattgtatgggatctgatctggggcctcggtacacatgctttacatgtgtttagtcgaggttaaaaaaacgtctaggccccccgaaccacggggacgtggttttcctttgaaaaacacgatgataatatggccacaacccatatgatggccttaccagtgaccgccttgctcctgccgctggccttgctgctccacgccgccaggccggagatcgtgatgacccagtcccccctgtccctgcccgtgacccccggcgagcccgcctccatctcctgccggtcctcccagtccctgctgcactccaacggctacaactacctggactggtacctgcagaagcccggccagtccccccagctgctgatctacctgggctccaaccgggcctccggcgtgcccgaccggttctccggctccggctccggcaccgacttcaccctgaagatctcccgggtggaggccgaggacgtgggcgtgtactactgcatgcaggccctgcagacccccaccttcggccccggcaccaaggtggacatcaagggcggcggcggctccggcggcggcggctccggcggcggcggctcccaggtgcagctggtgcagtccggcggcggcgtggtgcagcccggcaagtccctgcggctgtcctgcgccgcctccggcttcaccttctccatcttcgccatgcactgggtgcggcaggcccccggcaagggcctggagtgggtggccaccatctcctacgacggctccaacgccttctacgccgactccgtggagggccggttcaccatctcccgggacaactccaaggactccctgtacctgcagatggactccctgcggcccgaggacaccgccgtgtactactgcgtgaaggccggcgacggcggctacgacgtgttcgactcctggggccagggcaccctggtgaccgtgtcctccaccacgacgccagcgccgcgaccaccaacaccggcgcccaccatcgcgtcgcagcccctgtccctgcgcccagaggcgtgccggccagcggcggggggcgcagtgcacacgagggggctggacttcgcctgtgatatctacatctgggcgcccttggccgggacttgtggggtccttctcctgtcactggttatcaccaaacggggcagaaagaaactcctgtatatattcaaacaaccatttatgagaccagtacaaactactcaagaggaagatggctgtagctgccgatttccagaagaagaagaaggaggatgtgaactgagagtgaagttcagcaggagcgcagacgcccccgcgtacaagcagggccagaaccagctctataacgagctcaatctaggacgaagagaggagtacgatgttttggacaagaggcgtggccgggaccctgagatggggggaaagccgagaaggaagaaccctcaggaaggcctgtacaatgaactgcagaaagataagatggcggaggcctacagtgagattgggatgaaaggcgagcgccggaggggcaaggggcacgatggcctttaccagggtctcagtacagccaccaaggacacctacgacgcccttcacatgcaggccctgccccctcgctaa

SEQ ID NO: 264 - protein, 505 aa, Artificial Sequence
  Synthesized
DIVMTQSPSSLTVTAGEKVTMICKSSQSLLNSGDQKNYLTWYQQKPGQPPKLLIFWASTRESGVPDRFTGSGSGTDFTLTISSVQAEDLAVYYCQNDYSYPLTFGAGTKLELKGGGGSGGGGSGGGGSQVQLQQSDAELVKPGSSVKISCKASGYTFTDHAIHWVKQKPEQGLEWIGHFSPGNTDIKYNDKFKGKATLTVDRSSSTAYMQLNSLTSEDSAVYFCKTSTFFFDYWGQGTTLTVSSGGGGSGGGGSGGGGSDIVMTQAAFSNPVTLGTSASISCRSSKSLLHSNGITYFFWYLQKPGLSPQLLIYQMSNLASGVPDRFSSSGSGTDFTLRISRVEAEDVGVYYCAQNLELPPTFGGGTKLEIKRAGGGGSGGGGSGGGGSEVKLVESGGGLVQPGGSMKLSCVASGFTFSNYWMNWVRQSPEKGLEWVAEIRLKSNNYTTHYAESVKGRFTISRDDSKSSVSLQMNNLRVEDTGIYYCTRHYYFDYWGQGTTLTVSS

SEQ ID NO: 265 - protein, 505 aa, Artificial Sequence
  Synthesized
DIVMTQAAFSNPVTLGTSASISCRSSKSLLHSNGITYFFWYLQKPGLSPQLLIYQMSNLASGVPDRFSSSGSGTDFTLRISRVEAEDVGVYYCAQNLELPPTFGGGTKLEIKRAGGGGSGGGGSGGGGSEVKLVESGGGLVQPGGSMKLSCVASGFTFSNYWMNWVRQSPEKGLEWVAEIRLKSNNYTTHYAESVKGRFTISRDDSKSSVSLQMNNLRVEDTGIYYCTRHYYFDYWGQGTTLTVSSGGGGSGGGGSGGGGSDIVMTQSPSSLTVTAGEKVTMICKSSQSLLNSGDQKNYLTWYQQKPGQPPKLLIFWASTRESGVPDRFTGSGSGTDFTLTISSVQAEDLAVYYCQNDYSYPLTFGAGTKLELKGGGGSGGGGSGGGGSQVQLQQSDAELVKPGSSVKISCKASGYTFTDHAIHWVKQKPEQGLEWIGHFSPGNTDIKYNDKFKGKATLTVDRSSSTAYMQLNSLTSEDSAVYFCKTSTFFFDYWGQGTTLTVSS

SEQ ID NO: 266 - protein, 69 aa, Artificial Sequence; identical to SEQ ID NO: 30
  Synthesized

SEQ ID NO: 267 - protein, 66 aa, Artificial Sequence; identical to SEQ ID NO: 29
  Synthesized

SEQ ID NO: 268 - protein, 69 aa, Artificial Sequence; identical to SEQ ID NO: 2
  Synthesized

SEQ ID NO: 269 - protein, 72 aa, Artificial Sequence; identical to SEQ ID NO: 31
  Synthesized

SEQ ID NO: 270 - protein, 728 aa, Artificial Sequence
  Synthesized
DIVMTQSPSSLTVTAGEKVTMICKSSQSLLNSGDQKNYLTWYQQKPGQPPKLLIFWASTRESGVPDRFTGSGSGTDFTLTISSVQAEDLAVYYCQNDYSYPLTFGAGTKLELKGGGGSGGGGSGGGGSQVQLQQSDAELVKPGSSVKISCKASGYTFTDHAIHWVKQKPEQGLEWIGHFSPGNTDIKYNDKFKGKATLTVDRSSSTAYMQLNSLTSEDSAVYFCKTSTFFFDYWGQGTTLTVSSGGGGSGGGGSGGGGSDIVMTQAAFSNPVTLGTSASISCRSSKSLLHSNGITYFFWYLQKPGLSPQLLIYQMSNLASGVPDRFSSSGSGTDFTLRISRVEAEDVGVYYCAQNLELPPTFGGGTKLEIKRAGGGGSGGGGSGGGGSEVKLVESGGGLVQPGGSMKLSCVASGFTFSNYWMNWVRQSPEKGLEWVAEIRLKSNNYTTHYAESVKGRFTISRDDSKSSVSLQMNNLRVEDTGIYYCTRHYYFDYWGQGTTLTVSSTTTPAPRPPTPAPTIASQPLSLRPEACRPAAGGAVHTRGLDFACDIYIWAPLAGTCGVLLLSLVITLYCKRGRKKLLYIFKQPFMRPVQTTQEEDGCSCRFPEEEEGGCELRVKFSRSADAPAYQQGQNQLYNELNLGRREEYDVLDKRRGRDPEMGGKPRRKNPQEGLYNELQKDKMAEAYSEIGMKGERRRGKGHDGLYQGLSTATKDTYDALHMQALPPR

SEQ ID NO: 271 - protein, 725 aa, Artificial Sequence
  Synthesized
DIVMTQSPSSLTVTAGEKVTMICKSSQSLLNSGDQKNYLTWYQQKPGQPPKLLIFWASTRESGVPDRFTGSGSGTDFTLTISSVQAEDLAVYYCQNDYSYPLTFGAGTKLELKGGGGSGGGGSGGGGSQVQLQQSDAELVKPGSSVKISCKASGYTFTDHAIHWVKQKPEQGLEWIGHFSPGNTDIKYNDKFKGKATLTVDRSSSTAYMQLNSLTSEDSAVYFCKTSTFFFDYWGQGTTLTVSSGGGGSGGGGSGGGGSDIVMTQAAFSNPVTLGTSASISCRSSKSLLHSNGITYFFWYLQKPGLSPQLLIYQMSNLASGVPDRFSSSGSGTDFTLRISRVEAEDVGVYYCAQNLELPPTFGGGTKLEIKRAGGGGSGGGGSGGGGSEVKLVESGGGLVQPGGSMKLSCVASGFTFSNYWMNWVRQSPEKGLEWVAEIRLKSNNYTTHYAESVKGRFTISRDDSKSSVSLQMNNLRVEDTGIYYCTRHYYFDYWGQGTTLTVSSTTTPAPRPPTPAPTIASQPLSLRPEACRPAAGGAVHTRGLDFACDIYIWAPLAGTCGVLLLSLVITKRGRKKLLYIFKQPFMRPVQTTQEEDGCSCRFPEEEEGGCELRVKFSRSADAPAYQQGQNQLYNELNLGRREEYDVLDKRRGRDPEMGGKPRRKNPQEGLYNELQKDKMAEAYSEIGMKGERRRGKGHDGLYQGLSTATKDTYDALHMQALPPR

SEQ ID NO: 272 - protein, 728 aa, Artificial Sequence
  Synthesized
DIVMTQSPSSLTVTAGEKVTMICKSSQSLLNSGDQKNYLTWYQQKPGQPPKLLIFWASTRESGVPDRFTGSGSGTDFTLTISSVQAEDLAVYYCQNDYSYPLTFGAGTKLELKGGGGSGGGGSGGGGSQVQLQQSDAELVKPGSSVKISCKASGYTFTDHAIHWVKQKPEQGLEWIGHFSPGNTDIKYNDKFKGKATLTVDRSSSTAYMQLNSLTSEDSAVYFCKTSTFFFDYWGQGTTLTVSSGGGGSGGGGSGGGGSDIVMTQAAFSNPVTLGTSASISCRSSKSLLHSNGITYFFWYLQKPGLSPQLLIYQMSNLASGVPDRFSSSGSGTDFTLRISRVEAEDVGVYYCAQNLELPPTFGGGTKLEIKRAGGGGSGGGGSGGGGSEVKLVESGGGLVQPGGSMKLSCVASGFTFSNYWMNWVRQSPEKGLEWVAEIRLKSNNYTTHYAESVKGRFTISRDDSKSSVSLQMNNLRVEDTGIYYCTRHYYFDYWGQGTTLTVSSAKPTTTPAPRPPTPAPTIASQPLSLRPEACRPAAGGAVHTRGLDFACDIYIWAPLAGTCGVLLLSLVITKRGRKKLLYIFKQPFMRPVQTTQEEDGCSCRFPEEEEGGCELRVKFSRSADAPAYQQGQNQLYNELNLGRREEYDVLDKRRGRDPEMGGKPRRKNPQEGLYNELQKDKMAEAYSEIGMKGERRRGKGHDGLYQGLSTATKDTYDALHMQALPPR

SEQ ID NO: 273 - protein, 731 aa, Artificial Sequence
  Synthesized
DIVMTQSPSSLTVTAGEKVTMICKSSQSLLNSGDQKNYLTWYQQKPGQPPKLLIFWASTRESGVPDRFTGSGSGTDFTLTISSVQAEDLAVYYCQNDYSYPLTFGAGTKLELKGGGGSGGGGSGGGGSQVQLQQSDAELVKPGSSVKISCKASGYTFTDHAIHWVKQKPEQGLEWIGHFSPGNTDIKYNDKFKGKATLTVDRSSSTAYMQLNSLTSEDSAVYFCKTSTFFFDYWGQGTTLTVSSGGGGSGGGGSGGGGSDIVMTQAAFSNPVTLGTSASISCRSSKSLLHSNGITYFFWYLQKPGLSPQLLIYQMSNLASGVPDRFSSSGSGTDFTLRISRVEAEDVGVYYCAQNLELPPTFGGGTKLEIKRAGGGGSGGGGSGGGGSEVKLVESGGGLVQPGGSMKLSCVASGFTFSNYWMNWVRQSPEKGLEWVAEIRLKSNNYTTHYAESVKGRFTISRDDSKSSVSLQMNNLRVEDTGIYYCTRHYYFDYWGQGTTLTVSSAKPTTTPAPRPPTPAPTIASQPLSLRPEACRPAAGGAVHTRGLDFACDIYIWAPLAGTCGVLLLSLVITLYCKRGRKKLLYIFKQPFMRPVQTTQEEDGCSCRFPEEEEGGCELRVKFSRSADAPAYQQGQNQLYNELNLGRREEYDVLDKRRGRDPEMGGKPRRKNPQEGLYNELQKDKMAEAYSEIGMKGERRRGKGHDGLYQGLSTATKDTYDALHMQALPPR

SEQ ID NO: 274 - protein, 728 aa, Artificial Sequence
  Synthesized
DIVMTQAAFSNPVTLGTSASISCRSSKSLLHSNGITYFFWYLQKPGLSPQLLIYQMSNLASGVPDRFSSSGSGTDFTLRISRVEAEDVGVYYCAQNLELPPTFGGGTKLEIKRAGGGGSGGGGSGGGGSEVKLVESGGGLVQPGGSMKLSCVASGFTFSNYWMNWVRQSPEKGLEWVAEIRLKSNNYTTHYAESVKGRFTISRDDSKSSVSLQMNNLRVEDTGIYYCTRHYYFDYWGQGTTLTVSSGGGGSGGGGSGGGGSDIVMTQSPSSLTVTAGEKVTMICKSSQSLLNSGDQKNYLTWYQQKPGQPPKLLIFWASTRESGVPDRFTGSGSGTDFTLTISSVQAEDLAVYYCQNDYSYPLTFGAGTKLELKGGGGSGGGGSGGGGSQVQLQQSDAELVKPGSSVKISCKASGYTFTDHAIHWVKQKPEQGLEWIGHFSPGNTDIKYNDKFKGKATLTVDRSSSTAYMQLNSLTSEDSAVYFCKTSTFFFDYWGQGTTLTVSSTTTPAPRPPTPAPTIASQPLSLRPEACRPAAGGAVHTRGLDFACDIYIWAPLAGTCGVLLLSLVITLYCKRGRKKLLYIFKQPFMRPVQTTQEEDGCSCRFPEEEEGGCELRVKFSRSADAPAYQQGQNQLYNELNLGRREEYDVLDKRRGRDPEMGGKPRRKNPQEGLYNELQKDKMAEAYSEIGMKGERRRGKGHDGLYQGLSTATKDTYDALHMQALPPR

SEQ ID NO: 275 - protein, 725 aa, Artificial Sequence
  Synthesized
DIVMTQAAFSNPVTLGTSASISCRSSKSLLHSNGITYFFWYLQKPGLSPQLLIYQMSNLASGVPDRFSSSGSGTDFTLRISRVEAEDVGVYYCAQNLELPPTFGGGTKLEIKRAGGGGSGGGGSGGGGSEVKLVESGGGLVQPGGSMKLSCVASGFTFSNYWMNWVRQSPEKGLEWVAEIRLKSNNYTTHYAESVKGRFTISRDDSKSSVSLQMNNLRVEDTGIYYCTRHYYFDYWGQGTTLTVSSGGGGSGGGGSGGGGSDIVMTQSPSSLTVTAGEKVTMICKSSQSLLNSGDQKNYLTWYQQKPGQPPKLLIFWASTRESGVPDRFTGSGSGTDFTLTISSVQAEDLAVYYCQNDYSYPLTFGAGTKLELKGGGGSGGGGSGGGGSQVQLQQSDAELVKPGSSVKISCKASGYTFTDHAIHWVKQKPEQGLEWIGHFSPGNTDIKYNDKFKGKATLTVDRSSSTAYMQLNSLTSEDSAVYFCKTSTFFFDYWGQGTTLTVSSTTTPAPRPPTPAPTIASQPLSLRPEACRPAAGGAVHTRGLDFACDIYIWAPLAGTCGVLLLSLVITKRGRKKLLYIFKQPFMRPVQTTQEEDGCSCRFPEEEEGGCELRVKFSRSADAPAYQQGQNQLYNELNLGRREEYDVLDKRRGRDPEMGGKPRRKNPQEGLYNELQKDKMAEAYSEIGMKGERRRGKGHDGLYQGLSTATKDTYDALHMQALPPR

SEQ ID NO: 276 - protein, 728 aa, Artificial Sequence
  Synthesized
DIVMTQAAFSNPVTLGTSASISCRSSKSLLHSNGITYFFWYLQKPGLSPQLLIYQMSNLASGVPDRFSSSGSGTDFTLRISRVEAEDVGVYYCAQNLELPPTFGGGTKLEIKRAGGGGSGGGGSGGGGSEVKLVESGGGLVQPGGSMKLSCVASGFTFSNYWMNWVRQSPEKGLEWVAEIRLKSNNYTTHYAESVKGRFTISRDDSKSSVSLQMNNLRVEDTGIYYCTRHYYFDYWGQGTTLTVSSGGGGSGGGGSGGGGSDIVMTQSPSSLTVTAGEKVTMICKSSQSLLNSGDQKNYLTWYQQKPGQPPKLLIFWASTRESGVPDRFTGSGSGTDFTLTISSVQAEDLAVYYCQNDYSYPLTFGAGTKLELKGGGGSGGGGSGGGGSQVQLQQSDAELVKPGSSVKISCKASGYTFTDHAIHWVKQKPEQGLEWIGHFSPGNTDIKYNDKFKGKATLTVDRSSSTAYMQLNSLTSEDSAVYFCKTSTFFFDYWGQGTTLTVSSAKPTTTPAPRPPTPAPTIASQPLSLRPEACRPAAGGAVHTRGLDFACDIYIWAPLAGTCGVLLLSLVITKRGRKKLLYIFKQPFMRPVQTTQEEDGCSCRFPEEEEGGCELRVKFSRSADAPAYQQGQNQLYNELNLGRREEYDVLDKRRGRDPEMGGKPRRKNPQEGLYNELQKDKMAEAYSEIGMKGERRRGKGHDGLYQGLSTATKDTYDALHMQALPPR

SEQ ID NO: 277 - protein, 731 aa, Artificial Sequence
  Synthesized
DIVMTQAAFSNPVTLGTSASISCRSSKSLLHSNGITYFFWYLQKPGLSPQLLIYQMSNLASGVPDRFSSSGSGTDFTLRISRVEAEDVGVYYCAQNLELPPTFGGGTKLEIKRAGGGGSGGGGSGGGGSEVKLVESGGGLVQPGGSMKLSCVASGFTFSNYWMNWVRQSPEKGLEWVAEIRLKSNNYTTHYAESVKGRFTISRDDSKSSVSLQMNNLRVEDTGIYYCTRHYYFDYWGQGTTLTVSSGGGGSGGGGSGGGGSDIVMTQSPSSLTVTAGEKVTMICKSSQSLLNSGDQKNYLTWYQQKPGQPPKLLIFWASTRESGVPDRFTGSGSGTDFTLTISSVQAEDLAVYYCQNDYSYPLTFGAGTKLELKGGGGSGGGGSGGGGSQVQLQQSDAELVKPGSSVKISCKASGYTFTDHAIHWVKQKPEQGLEWIGHFSPGNTDIKYNDKFKGKATLTVDRSSSTAYMQLNSLTSEDSAVYFCKTSTFFFDYWGQGTTLTVSSAKPTTTPAPRPPTPAPTIASQPLSLRPEACRPAAGGAVHTRGLDFACDIYIWAPLAGTCGVLLLSLVITLYCKRGRKKLLYIFKQPFMRPVQTTQEEDGCSCRFPEEEEGGCELRVKFSRSADAPAYQQGQNQLYNELNLGRREEYDVLDKRRGRDPEMGGKPRRKNPQEGLYNELQKDKMAEAYSEIGMKGERRRGKGHDGLYQGLSTATKDTYDALHMQALPPR

SEQ ID NO: 278 - protein, 5 aa, Artificial Sequence
  Synthesized
GGGGS

SEQ ID NO: 279 - DNA, 1470 bp, Artificial Sequence
  Synthesized
atggccttaccagtgaccgccttgctcctgccgctggccttgctgctccacgccgccaggccgcagtccgtgctgacccagccaccttccgtgtctgccgctccaggccagaaggtgacaatcagctgctccggcagctcctctgacatcggaagcaactacgtgtcctggtaccagcagttcccaggcaccgcccccaagctgctgatctacgacaacaacaagaggcctagcgccatcccagatagattttctggcagcaagtccggaacctccgccacactgggcatcaccggactgcagacaggcgacgaggctgattactactgcggcacatgggattccaggctgggaatcgccgtgttcggaggaggaacccagctgacagtgctgggcggaggaggaggaagcggaggaggaggatccggaggaggaggatctgaggtgcagctggtgcagtctggcgccgaggtgaagaagcctggacagtctctgaagatcagctgtaaggcttccggctactctctgaccgacaactggatcggatgggtgcggcagaagccaggcaagggactggagtggatgggcatcatctacccaggagactctgatacacgctactctcccagctttcagggccaggtgaccatctccgccgataagtctatcaacacagcttacctgcagtggagctccctgaaggccagcgacaccgctatctactactgcgtgggcctggattggaactacaacccactgaggtactggggacctggaaccctggtgacagtgtctagcaccacgacgccagcgccgcgaccaccaacaccggcgcccaccatcgcgtcgcagcccctgtccctgcgcccagaggcgtgccggccagcggcggggggcgcagtgcacacgagggggctggacttcgcctgtgatatctacatctgggcgcccttggccgggacttgtggggtccttctcctgtcactggttatcaccctttactgcaaacggggcagaaagaaactcctgtatatattcaaacaaccatttatgagaccagtacaaactactcaagaggaagatggctgtagctgccgatttccagaagaagaagaaggaggatgtgaactgagagtgaagttcagcaggagcgcagacgcccccgcgtacaagcagggccagaaccagctctataacgagctcaatctaggacgaagagaggagtacgatgttttggacaagaggcgtggccgggaccctgagatggggggaaagccgagaaggaagaaccctcaggaaggcctgtacaatgaactgcagaaagataagatggcggaggcctacagtgagattgggatgaaaggcgagcgccggaggggcaaggggcacgatggcctttaccagggtctcagtacagccaccaaggacacctacgacgcccttcacatgcaggccctgccccctcgctaa

SEQ ID NO: 280 - protein, 196 aa, Artificial Sequence; identical to SEQ ID NO: 97
  Synthesized

SEQ ID NO: 281 - protein, 196 aa, Artificial Sequence; identical to SEQ ID NO: 98
  Synthesized

SEQ ID NO: 282 - protein, 196 aa, Flavobacterium ameridies; identical to SEQ ID NO: 96

SEQ ID NO: 283 - DNA, 24 bp, Homo sapiens
ggctcctgctgcatcgtagctgct

SEQ ID NO: 284 - protein, 7 aa, Artificial Sequence
  Synthesized
QRASLTR

SEQ ID NO: 285 - DNA, 24 bp, Homo sapiens
agctgccccttcgcggacgtggcc

SEQ ID NO: 286 - protein, 7 aa, Artificial Sequence
  Synthesized
DRSNLTR

SEQ ID NO: 287 - protein, 7 aa, Artificial Sequence
  Synthesized
RSDALSR

SEQ ID NO: 288 - protein, 7 aa, Artificial Sequence
  Synthesized
ERGTLAR

SEQ ID NO: 289 - DNA, 24 bp, Homo sapiens
tgccgcccctactgtggagatgga

SEQ ID NO: 290 - protein, 7 aa, Artificial Sequence
  Synthesized
TSGNLVR

SEQ ID NO: 291 - protein, 7 aa, Artificial Sequence
  Synthesized
QSGHLAR

SEQ ID NO: 292 - protein, 7 aa, Artificial Sequence
  Synthesized
RSDDLQR

SEQ ID NO: 293 - DNA, 24 bp, Homo sapiens
accatcaacagactggaagtgggg

SEQ ID NO: 294 - protein, 7 aa, Artificial Sequence
  Synthesized
QTVNLDR

SEQ ID NO: 295 - protein, 7 aa, Artificial Sequence
  Synthesized
KKDHLHR

SEQ ID NO: 296 - DNA, 24 bp, Homo sapiens
agctgccccttcgcggacgtggcc

SEQ ID NO: 297 - protein, 7 aa, Artificial Sequence
  Synthesized
HHNSLTR

SEQ ID NO: 298 - protein, 7 aa, Artificial Sequence
  Synthesized
MKHHLDA

SEQ ID NO: 299 - protein, 7 aa, Artificial Sequence
  Synthesized
DPSNLRR

SEQ ID NO: 300 - protein, 7 aa, Artificial Sequence
  Synthesized
RREVLEN

SEQ ID NO: 301 - protein, 7 aa, Artificial Sequence
  Synthesized
QSGSLTR

SEQ ID NO: 302 - protein, 7 aa, Artificial Sequence
  Synthesized
DRSDLTR

SEQ ID NO: 303 - protein, 7 aa, Artificial Sequence
  Synthesized
QSSALTR

SEQ ID NO: 304 - DNA, 24 bp, Homo sapiens
tgcggcaacctacatgatggggaa

SEQ ID NO: 305 - protein, 7 aa, Artificial Sequence
  Synthesized
QRSNLVR

SEQ ID NO: 306 - protein, 7 aa, Artificial Sequence
  Synthesized
RSDHLTR

SEQ ID NO: 307 - protein, 7 aa, Artificial Sequence
  Synthesized
TSANLSR

SEQ ID NO: 308 - protein, 7 aa, Artificial Sequence
  Synthesized
QSSDLTR

SEQ ID NO: 309 - protein, 7 aa, Artificial Sequence
  Synthesized
RSDNLAR

SEQ ID NO: 310 - protein, 7 aa, Artificial Sequence
  Synthesized
QSGHLQR

SEQ ID NO: 311 - DNA, 23 bp, Homo sapiens
agcctctccagccaggggctgag

SEQ ID NO: 312 - protein, 7 aa, Artificial Sequence
  Synthesized
RSDHLSR

SEQ ID NO: 313 - protein, 7 aa, Artificial Sequence
  Synthesized
RSDHLAR

SEQ ID NO: 314 - protein, 7 aa, Artificial Sequence
  Synthesized
QSGDLTR

SEQ ID NO: 315 - protein, 7 aa, Artificial Sequence
  Synthesized
RSDDLTR

SEQ ID NO: 316 - protein, 7 aa, Artificial Sequence
  Synthesized
RSDALTR

SEQ ID NO: 317 - protein, 7 aa, Artificial Sequence
  Synthesized
TSGHLVR

SEQ ID NO: 318 - protein, 7 aa, Artificial Sequence
  Synthesized
QSSDLQR

SEQ ID NO: 319 - DNA, 24 bp, Artificial Sequence
  Synthesized
ccctgccgcctgcctgctggtgtg

SEQ ID NO: 320 - protein, 7 aa, Artificial Sequence
  Synthesized
GGTALRM

SEQ ID NO: 321 - protein, 7 aa, Artificial Sequence
  Synthesized
QRSSLVR

SEQ ID NO: 322 - protein, 7 aa, Artificial Sequence
  Synthesized
QRNNLGR

SEQ ID NO: 323 - protein, 7 aa, Artificial Sequence
  Synthesized
RKRNLIM

SEQ ID NO: 324 - protein, 7 aa, Artificial Sequence
  Synthesized
VRHNLTR

SEQ ID NO: 325 - protein, 7 aa, Artificial Sequence
  Synthesized
RGDKLGP

SEQ ID NO: 326 - DNA, 24 bp, Homo sapiens
gtttacttcctttggggggattgc

SEQ ID NO: 327 - protein, 7 aa, Artificial Sequence
  Synthesized
SRFTLGR

SEQ ID NO: 328 - protein, 7 aa, Artificial Sequence
  Synthesized
RREHLVR

SEQ ID NO: 329 - protein, 7 aa, Artificial Sequence
  Synthesized
QTATLKR

SEQ ID NO: 330 - protein, 7 aa, Artificial sequence
  Synthesized
KHSNLAR

SEQ ID NO: 331 - protein, 7 aa, Artificial Sequence
  Synthesized
QSTTLKR

SEQ ID NO: 332 - protein, 7 aa, Artificial Sequence
  Synthesized
RADGLQL

SEQ ID NO: 333 - DNA, 24 bp, Artificial Sequence
  Synthesized
cacccctgcaccgactcggcagag

SEQ ID NO: 334 - protein, 7 aa, Artificial Sequence
  Synthesized
TRQKLET

SEQ ID NO: 335 - protein, 7 aa, Artificial Sequence
  Synthesized
RQDNLGR

SEQ ID NO: 336 - protein, 7 aa, Artificial Sequence
  Synthesized
QQHGLRH

SEQ ID NO: 337 - protein, 7 aa, Artificial Sequence
  Synthesized
TKKILTV

SEQ ID NO: 338 - protein, 7 aa, Artificial Sequence
  Synthesized
HKSSLTR

SEQ ID NO: 339 - protein, 7 aa, Artificial Sequence
  Synthesized
RSDHLSL

SEQ ID NO: 340 - DNA, 23 bp, Homo sapiens
accctcacaacctttgggttgtc

SEQ ID NO: 341 - protein, 7 aa, Artificial Sequence
  Synthesized
RKHHLGR

SEQ ID NO: 342 - protein, 7 aa, Artificial Sequence
  Synthesized
VSNSLAR

SEQ ID NO: 343 - protein, 7 aa, Artificial Sequence
  Synthesized
RTSSLKR

SEQ ID NO: 344 - protein, 7 aa, Artificial Sequence
  Synthesized
QRSDLTR

SEQ ID NO: 345 - protein, 7 aa, Artificial Sequence
  Synthesized
RSDGLRG

SEQ ID NO: 346 - DNA, 24 bp, Homo sapiens
ccccccagcaccctttcggctgtg

SEQ ID NO: 347 - protein, 7 aa, Artificial Sequence
  Synthesized
DSPTLRR

SEQ ID NO: 348 - protein, 7 aa, Artificial Sequence
  Synthesized
QSAHLKR

SEQ ID NO: 349 - protein, 7 aa, Artificial Sequence
  Synthesized
QDVSLVR

SEQ ID NO: 350 - protein, 7 aa, Artificial Sequence
  Synthesized
MKNTLTR

SEQ ID NO: 351 - protein, 7 aa, Artificial Sequence
  Synthesized
QSGTLTR

SEQ ID NO: 352 - DNA, 24 bp, Homo sapiens
ggctcctgctgcatcgtagctgct

SEQ ID NO: 353 - protein, 7 aa, Artificial Sequence
  Synthesized
TKQILGR

SEQ ID NO: 354 - protein, 7 aa, Artificial Sequence
  synthesized
RTEHLAR

SEQ ID NO: 355 - protein, 7 aa, Artificial Sequence
  Synthesized
KRRDLDR

SEQ ID NO: 356 - protein, 237 aa, Artificial Sequence
  Synthesized
DIQMTQSPSSLSTSVGDRVTLTCKASQDVGTAVDWYQQKPGPSPKLLIYWASTRHTGIPSRFSGSGSGTDFTLTISSLQPEDFADYYCQQYNSYPLTFGPGTKVDIKGGGGSGGGGSGGGGSEVQLVQSGPEVKKPGATVKISCKTSGYTFTEYTIHWVKQAPGKGLEWIGNINPNNGGTTYNQKFEDKATLTVDKSTDTAYMELSSLRSEDTAVYYCAAGWNFDYWGQGTLLTVSS

SEQ ID NO: 357 - protein, 7 aa, Artificial Sequence
  Synthesized
RTSSLKR

SEQ ID NO: 358 - protein, 7 aa, Artificial Sequence
  Synthesized
QRSDLTR

SEQ ID NO: 359 - protein, 7 aa, Artificial Sequence
  Synthesized
RSDHLSL

SEQ ID NO: 360 - DNA, 25 bp, Homo sapiens
cacagcccaagatagttaagtgggg

SEQ ID NO: 361 - protein, 7 aa, Artificial Sequence
  Synthesized
KKDHLHR

SEQ ID NO: 362 - protein, 7 aa, Artificial Sequence
  Synthesized
RREVLEN

SEQ ID NO: 363 - protein, 7 aa, Artificial Sequence
  Synthesized
QRGNLNM

SEQ ID NO: 364 - protein, 7 aa, Artificial Sequence
  Synthesized
VPSKLKR

SEQ ID NO: 365 - protein, 7 aa, Artificial Sequence
  Synthesized
EAHHLSR

SEQ ID NO: 366 - protein, 7 aa, Artificial Sequence
  Synthesized
QDGNLTR

SEQ ID NO: 367 - protein, 7 aa, Artificial Sequence
  Synthesized
TSTLLNR

SEQ ID NO: 368 - protein, 7 aa, Artificial Sequence
  Synthesized
QQTNLTR

SEQ ID NO: 369 - protein, 7 aa, Artificial Sequence
  Synthesized
VGNSLTR

SEQ ID NO: 370 - protein, 7 aa, Artificial Sequence
  Synthesized
QSGSLTR

SEQ ID NO: 371 - protein, 7 aa, Artificial Sequence
  Synthesized
TSGNLVR

SEQ ID NO: 372 - protein, 7 aa, Artificial Sequence
  Synthesized
QSGDLTR

SEQ ID NO: 373 - protein, 7 aa, Artificial Sequence
  Synthesized
RSDNLAR

SEQ ID NO: 374 - protein, 7 aa, Artificial Sequence
  Synthesized
DRSDLTR

SEQ ID NO: 375 - protein, 7 aa, Artificial Sequence
  Synthesized
QSGHLQR

SEQ ID NO: 376 - protein, 7 aa, Artificial Sequence
  Synthesized
DRSHLTR

SEQ ID NO: 377 - protein, 7 aa, Artificial Sequence
  Synthesized
RSDALSR

SEQ ID NO: 378 - protein, 7 aa, Artificial Sequence
  Synthesized
QSSDLQR

SEQ ID NO: 379 - protein, 7 aa, Artificial Sequence
  Synthesized
ERGTLAR

SEQ ID NO: 380 - protein, 7 aa, Artificial Sequence
  Synthesized
RSDDLQR

SEQ ID NO: 381 - protein, 7 aa, Artificial Sequence
  Synthesized
RSDALTR

SEQ ID NO: 382 - protein, 7 aa, Artificial Sequence
  Synthesized
RSDHLAR

SEQ ID NO: 383 - protein, 7 aa, Artificial Sequence
  Synthesized
QSGDLTR

SEQ ID NO: 384 - protein, 7 aa, Artificial Sequence
  Synthesized
QSGHLQR

SEQ ID NO: 385 - protein, 7 aa, Artificial Sequence
  Synthesized
QSSDLTR

SEQ ID NO: 386 - protein, 7 aa, Artificial Sequence
  Synthesized
RSDNLRE

SEQ ID NO: 387 - protein, 7 aa, Artificial Sequence
  Synthesized
RSDHLSR

SEQ ID NO: 388 - protein, 7 aa, Artificial Sequence
  Synthesized
QSGHLAR

SEQ ID NO: 389 - protein, 7 aa, Artificial Sequence
  Synthesized
DRSDLTR

SEQ ID NO: 390 - protein, 7 aa, Artificial Sequence
  Synthesized
QSGNLAR

SEQ ID NO: 391 - protein, 7 aa, Artificial Sequence
  Synthesized
DRSHLTR

SEQ ID NO: 392 - protein, 7 aa, Artificial Sequence
  Synthesized
QSGDLTR

SEQ ID NO: 393 - protein, 7 aa, Artificial Sequence
  Synthesized
QSGHLQR

SEQ ID NO: 394 - protein, 7 aa, Artificial Sequence
  Synthesized
RSHILTN

SEQ ID NO: 395 - protein, 7 aa, Artificial Sequence
  Synthesized
QSTTLKR

SEQ ID NO: 396 - protein, 7 aa, Artificial Sequence
  Synthesized
DGGHLTR

SEQ ID NO: 397 - protein, 7 aa, Artificial Sequence
  Synthesized
RQMNLDR

SEQ ID NO: 398 - protein, 7 aa, Artificial Sequence
  Synthesized
RQDNLGR

SEQ ID NO: 399 - protein, 7 aa, Artificial Sequence
  Synthesized
DKSVLAR

SEQ ID NO: 400 - DNA, 23 bp, Homo sapiens
gccaccttcccccagctgaagtc

SEQ ID NO: 401 - DNA, 24 bp, Homo sapiens
tgcatctgcgacgtgggagccgag

SEQ ID NO: 402 - DNA, 23 bp, Homo sapiens
gcccacagccactcgtggcggcc

SEQ ID NO: 403 - DNA, 23 bp, Homo sapiens
ccctgctccctccgggggctgct

SEQ ID NO: 404 - DNA, 23 bp, Homo sapiens
tccggcttctccatggagcaggc

SEQ ID NO: 405 - DNA, 24 bp, Homo sapiens
cactgcgcccacgaggccgaggag

SEQ ID NO: 406 - protein, 7 aa, Artificial Sequence
  Synthesized
HKWVLRQ

SEQ ID NO: 407 - protein, 7 aa, Artificial Sequence
  Synthesized
DRSNLTR

SEQ ID NO: 408 - DNA, 19 bp, Homo sapiens
gttgctccaggccacagca

SEQ ID NO: 409 - protein, 7 aa, Artificial Sequence
  Synthesized
QSGDLTR

SEQ ID NO: 410 - protein, 7 aa, Artificial Sequence
  Synthesized
QWGTRYR

SEQ ID NO: 411 - protein, 7 aa, Artificial Sequence
  Synthesized
ERGTLAR

SEQ ID NO: 412 - protein, 7 aa, Artificial Sequence
  Synthesized
QSGDLTR

SEQ ID NO: 413 - protein, 7 aa, Artificial Sequence
  Synthesized
TSGALTR

SEQ ID NO: 414 - DNA, 12 bp, Homo sapiens
gactttgcatgt

SEQ ID NO: 415 - protein, 7 aa, Artificial Sequence
  Synthesized
WRSSLAS

SEQ ID NO: 416 - protein, 7 aa, Artificial Sequence
  Synthesized
QSGSLTR

SEQ ID NO: 417 - protein, 9 aa, Artificial Sequence
  Synthesized
TGPGAAARA

SEQ ID NO: 418 - protein, 5 aa, Artificial Sequence
  Synthesized
LRGSQ

SEQ ID NO: 419 - DNA, 18 bp, Homo sapiens
ctccagccaggtccatct

SEQ ID NO: 420 - DNA, 17 bp, Homo sapiens
tctccagccaggtccat

SEQ ID NO: 421 - DNA, 15 bp, Homo sapiens
tcagcaggctgttgt

SEQ ID NO: 422 - DNA, 17 bp, Homo sapiens
tcagcaggctgttgtgt

SEQ ID NO: 423 - DNA, 15 bp, Homo sapiens
ccctggtctcttcat

SEQ ID NO: 424 - DNA, 16 bp, Homo sapiens
aagcctccctggtctt

SEQ ID NO: 425 - DNA, 15 bp, Homo sapiens
aagcctccctggtct

SEQ ID NO: 426 - DNA, 17 bp, Homo sapiens
gctgaccccctgtgcct

SEQ ID NO: 427 - DNA, 16 bp, Homo sapiens
gaccccctgtgcctct

SEQ ID NO: 428 - protein, 21 aa, Artificial Sequence
  Synthesized
MALPVTALLLPLALLLHAARP

SEQ ID NO: 429 - protein, 111 aa, Artificial Sequence
  Synthesized
QSVLTQPPSVSAAPGQKVTISCSGSSSDIGSNYVSWYQQFPGTAPKLLIYDNNKRPSAIPDRFSGSKSGTSATLGITGLQTGDEADYYCGTWDSRLGIAVFGGGTQLTVLG

SEQ ID NO: 430 - protein, 119 aa, Artificial Sequence [sequence omitted]

SEQ ID NO: 431 - protein, 20 aa, Artificial Sequence
  Synthesized
GGGGSGGGGSGGGGSGGGGS

SEQ ID NO: 432 - protein, 120 aa, Artificial Sequence
  Synthesized
EVQLVESGGGLVQPGGSLRLSCAASGVSLPDYGVSWVRQAPGKGLEWVSVIWGSETTYYNSALKSRFTISRDNAKNSLYLQMNSLRAEDTAVYYCAKHYYYGGSYAMDYWGQGTLVTVSS

SEQ ID NO: 433 - protein, 107 aa, Artificial Sequence; identical to SEQ ID NO: 74
  Synthesized

SEQ ID NO: 434 - protein, 240 aa, Artificial Sequence
  Synthesized
DIVMTQSHKFMSTSIGARVSITCKASQDVRTAVAWYQQKPGQSPKLLIYSASYRYTGVPDRFTGSGSGTDFTFTISSVQAEDLAVYYCQQHYGTPPWTFGGGTKLEIKGGGGSGGGGSGGGGSEVQLVESGGGLVKPGGSLKLSCEASRFTFSSYAMSWVRQTPEKRLEWVAAISGGGRYTYYPDSMKGRFTISRDNAKNFLYLQMSSLRSEDTAMYYCARHYDGYLDYWGQGTTLTVSS

SEQ ID NO: 435 - protein, 238 aa, Artificial Sequence
  Synthesized
DIVMTQSHKFMSTSIGARVSITCKASQDVRTAVAWYQQKPGQSPKWYSASYRYTGVPDRFTGSGSGTDFTFTISSVQAEDLAVYYCQQHYGTPPWTFGGGTKLEIKGGGGSGGGGSGGGGSEVQLVESGGGLVKPGGSLKLSCEASRFTFSSYAMSWVRQTPEKRLEWVAAISGGGRYTYYPDSMKGRFTISRDNAKNFLYLQMSSLRSEDTAMYYCARHYDGYLDYWGQGTTLTVSS

SEQ ID NO: 436 - protein, 244 aa, Artificial Sequence
  Synthesized
EVQLVESGGGLVQPGGSLRLSCAASGFTFSSFGMHWVRQAPGKGLEWVAYISSDSSAIYYADTVKGRFTISRDNAKNSLYLQMNSLRDEDTAVYYCGRGRENIYYGSRLDYWGQGTTVTVSSGGGGSGGGGSGGGGSDIQLTQSPSFLSASVGDRVTITCKASQNVDTNVAWYQQKPGKAPKALIYSASYRYSGVPSRFSGSGSGTDFTLTISSLQPEDFATYYCQQYNNYPFTFGQGTKLEIK

SEQ ID NO: 437 - protein, 113 aa, Artificial Sequence
  Synthesized
DIVMTQSPSSLTVTAGEKVTMSCKSSQSLLNSGNQKNYLTWYQQKPGQPPKLLIYWASTRESGVPDRFTGSGSGTDFTLTISSVQAEDLAVYYCQNDYSYPFTFGSGTKLEIK

SEQ ID NO: 438 - protein, 118 aa, Artificial Sequence
  Synthesized
QVQLQQPGAELVRPGASVKLSCKASGYTFTSYWINWVKQRPGQGLEWIGNIYPSDSYTNYNQKFKDKATLTVDKSSSTAYMQLSSPTSEDSAVYYCTRSWRGNSFDYWGQGTTLTVSS

SEQ ID NO: 439 - protein, 490 aa, Artificial Sequence
  Synthesized
MALPVTALLLPLALLLHAARPDIVMTQSPSSLTVTAGEKVTMSCKSSQSLLNSGNQKNYLTWYQQKPGQPPKLLIYWASTRESGVPDRFTGSGSGTDFTLTISSVQAEDLAVYYCQNDYSYPFTFGSGTKLEIKGGGGSGGGGSGGGGSQVQLQQPGAELVRPGASVKLSCKASGYTFTSYWINWVKQRPGQGLEWIGNIYPSDSYTNYNQKFKDKATLTVDKSSSTAYMQLSSPTSEDSAVYYCTRSWRGNSFDYWGQGTTLTVSSTTTPAPRPPTPAPTIASQPLSLRPEACRPAAGGAVHTRGLDFACDIYIWAPLAGTCGVLLLSLVITLYCKRGRKKLLYIFKQPFMRPVQTTQEEDGCSCRFPEEEEGGCELRVKFSRSADAPAYQQGQNQLYNELNLGRREEYDVLDKRRGRDPEMGGKPRRKNPQEGLYNELQKDKMAEAYSEIGMKGERRRGKGHDGLYQGLSTATKDTYDALHMQALPPR

SEQ ID NO: 440 - protein, 510 aa, Artificial Sequence
  synthesized
DIVMTQSPSSLTVTAGEKVTMSCKSSQSLLNSGNQKNYLTWYQQKPGQPPKLLIYWASTRESGVPDRFTGSGSGTDFTLTISSVQAEDLAVYYCQNDYSYPFTFGSGTKLEIKGGGGSGGGGSGGGGSQVQLQQPGAELVRPGASVKLSCKASGYTFTSYWINWVKQRPGQGLEWIGNIYPSDSYTNYNQKFKDKATLTVDKSSSTAYMQLSSPTSEDSAVYYCTRSWRGNSFDYWGQGTTLTVSSGGGGSGGGGSGGGGSGGGGSDIVMTQSPSSLTVTAGEKVTMICKSSQSLLNSGDQKNYLTWYQQKPGQPPKLLIFWASTRESGVPDRFTGSGSGTDFTLTISSVQAEDLAVYYCQNDYSYPLTFGAGTKLELKGGGGSGGGGSGGGGSQVQLQQSDAELVKPGSSVKISCKASGYTFTDHAIHWVKQKPEQGLEWIGHFSPGNTDIKYNDKFKGKATLTVDRSSSTAYMQLNSLTSEDSAVYFCKTSTFFFDYWGQGTTLTVSS

SEQ ID NO: 441 - protein, 510 aa, Artificial Sequence
  synthesized
DIVMTQSPSSLTVTAGEKVTMSCKSSQSLLNSGNQKNYLTWYQQKPGQPPKLLIYWASTRESGVPDRFTGSGSGTDFTLTISSVQAEDLAVYYCQNDYSYPFTFGSGTKLEIKGGGGSGGGGSGGGGSQVQLQQPGAELVRPGASVKLSCKASGYTFTSYWINWVKQRPGQGLEWIGNIYPSDSYTNYNQKFKDKATLTVDKSSSTAYMQLSSPTSEDSAVYYCTRSWRGNSFDYWGQGTTLTVSSGGGGSGGGGSGGGGSGGGGSQVQLQQSDAELVKPGSSVKISCKASGYTFTDHAIHWVKQKPEQGLEWIGHFSPGNTDIKYNDKFKGKATLTVDRSSSTAYMQLNSLTSEDSAVYFCKTSTFFFDYWGQGTTLTVSSGGGGSGGGGSGGGGSDIVMTQSPSSLTVTAGEKVTMICKSSQSLLNSGDQKNYLTWYQQKPGQPPKLLIFWASTRESGVPDRFTGSGSGTDFTLTISSVQAEDLAVYYCQNDYSYPLTFGAGTKLELK

SEQ ID NO: 442 - protein, 510 aa, Artificial Sequence
  synthesized
DIVMTQSPSSLTVTAGEKVTMSCKSSQSLLNSGNQKNYLTWYQQKPGQPPKLLIYWASTRESGVPDRFTGSGSGTDFTLTISSVQAEDLAVYYCQNDYSYPLTFGAGTKLELKGGGGSGGGGSGGGGSQIQLVQSGPELKKPGETVKISCKASGYTFTNYGMNWVKQAPGKGLKWMGWINTNTGEPTYAEEFKGRFAFSLETSASTAYLQINNLKNEDTATYFCARLGFGNAMDYWGQGTSVTVSSGGGGSGGGGSGGGGSGGGGSDIVMTQSPSSLTVTAGEKVTMICKSSQSLLNSGDQKNYLTWYQQKPGQPPKLLIFWASTRESGVPDRFTGSGSGTDFTLTISSVQAEDLAVYYCQNDYSYPLTFGAGTKLELKGGGGSGGGGSGGGGSQVQLQQSDAELVKPGSSVKISCKASGYTFTDHAIHWVKQKPEQGLEWIGHFSPGNTDIKYNDKFKGKATLTVDRSSSTAYMQLNSLTSEDSAVYFCKTSTFFFDYWGQGTTLTVSS

SEQ ID NO: 443 - protein, 510 aa, Artificial Sequence
  synthesized
DIVMTQSPSSLTVTAGEKVTMSCKSSQSLLNSGNQKNYLTWYQQKPGQPPKLLIYWASTRESGVPDRFTGSGSGTDFTLTISSVQAEDLAVYYCQNDYSYPLTFGAGTKLELKGGGGSGGGGSGGGGSQIQLVQSGPELKKPGETVKISCKASGYTFTNYGMNWVKQAPGKGLKWMGWINTNTGEPTYAEEFKGRFAFSLETSASTAYLQINNLKNEDTATYFCARLGFGNAMDYWGQGTSVTVSSGGGGSGGGGSGGGGSGGGGSQVQLQQSDAELVKPGSSVKISCKASGYTFTDHAIHWVKQKPEQGLEWIGHFSPGNTDIKYNDKFKGKATLTVDRSSSTAYMQLNSLTSEDSAVYFCKTSTFFFDYWGQGTTLTVSSGGGGSGGGGSGGGGSDIVMTQSPSSLTVTAGEKVTMICKSSQSLLNSGDQKNYLTWYQQKPGQPPKLLIFWASTRESGVPDRFTGSGSGTDFTLTISSVQAEDLAVYYCQNDYSYPLTFGAGTKLELK

SEQ ID NO: 444 - protein, 510 aa, Artificial Sequence
  synthesized
DIVMTQSPSSLTVTAGEKVTMICKSSQSLLNSGDQKNYLTWYQQKPGQPPKLLIFWASTRESGVPDRFTGSGSGTDFTLTISSVQAEDLAVYYCQNDYSYPLTFGAGTKLELKGGGGSGGGGSGGGGSQVQLQQSDAELVKPGSSVKISCKASGYTFTDHAIHWVKQKPEQGLEWIGHFSPGNTDIKYNDKFKGKATLTVDRSSSTAYMQLNSLTSEDSAVYFCKTSTFFFDYWGQGTTLTVSSGGGGSGGGGSGGGGSGGGGSDIVMTQSPSSLTVTAGEKVTMSCKSSQSLLNSGNQKNYLTWYQQKPGQPPKLLIYWASTRESGVPDRFTGSGSGTDFTLTISSVQAEDLAVYYCQNDYSYPFTFGSGTKLEIKGGGGSGGGGSGGGGSQVQLQQPGAELVRPGASVKLSCKASGYTFTSYWINWVKQRPGQGLEWIGNIYPSDSYTNYNQKFKDKATLTVDKSSSTAYMQLSSPTSEDSAVYYCTRSWRGNSFDYWGQGTTLTVSS

SEQ ID NO: 445 - protein, 510 aa, Artificial Sequence
  synthesized
DIVMTQSPSSLTVTAGEKVTMICKSSQSLLNSGDQKNYLTWYQQKPGQPPKLLIFWASTRESGVPDRFTGSGSGTDFTLTISSVQAEDLAVYYCQNDYSYPLTFGAGTKLELKGGGGSGGGGSGGGGSQVQLQQSDAELVKPGSSVKISCKASGYTFTDHAIHWVKQKPEQGLEWIGHFSPGNTDIKYNDKFKGKATLTVDRSSSTAYMQLNSLTSEDSAVYFCKTSTFFFDYWGQGTTLTVSSGGGGSGGGGSGGGGSGGGGSQVQLQQPGAELVRPGASVKLSCKASGYTFTSYWINWVKQRPGQGLEWIGNIYPSDSYTNYNQKFKDKATLTVDKSSSTAYMQLSSPTSEDSAVYYCTRSWRGNSFDYWGQGTTLTVSSGGGGSGGGGSGGGGSDIVMTQSPSSLTVTAGEKVTMSCKSSQSLLNSGNQKNYLTWYQQKPGQPPKLLIYWASTRESGVPDRFTGSGSGTDFTLTISSVQAEDLAVYYCQNDYSYPFTFGSGTKLEIK

SEQ ID NO: 446 - protein, 510 aa, Artificial Sequence
  synthesized
DIVMTQSPSSLTVTAGEKVTMICKSSQSLLNSGDQKNYLTWYQQKPGQPPKLLIFWASTRESGVPDRFTGSGSGTDFTLTISSVQAEDLAVYYCQNDYSYPLTFGAGTKLELKGGGGSGGGGSGGGGSQVQLQQSDAELVKPGSSVKISCKASGYTFTDHAIHWVKQKPEQGLEWIGHFSPGNTDIKYNDKFKGKATLTVDRSSSTAYMQLNSLTSEDSAVYFCKTSTFFFDYWGQGTTLTVSSGGGGSGGGGSGGGGSGGGGSDIVMTQSPSSLTVTAGEKVTMSCKSSQSLLNSGNQKNYLTWYQQKPGQPPKLLIYWASTRESGVPDRFTGSGSGTDFTLTISSVQAEDLAVYYCQNDYSYPLTFGAGTKLELKGGGGSGGGGSGGGGSQIQLVQSGPELKKPGETVKISCKASGYTFTNYGMNWVKQAPGKGLKWMGWINTNTGEPTYAEEFKGRFAFSLETSASTAYLQINNLKNEDTATYFCARLGFGNAMDYWGQGTSVTVSS

SEQ ID NO: 447 - protein, 510 aa, Artificial Sequence
  synthesized
DIVMTQSPSSLTVTAGEKVTMICKSSQSLLNSGDQKNYLTWYQQKPGQPPKLLIFWASTRESGVPDRFTGSGSGTDFTLTISSVQAEDLAVYYCQNDYSYPLTFGAGTKLELKGGGGSGGGGSGGGGSQVQLQQSDAELVKPGSSVKISCKASGYTFTDHAIHWVKQKPEQGLEWIGHFSPGNTDIKYNDKFKGKATLTVDRSSSTAYMQLNSLTSEDSAVYFCKTSTFFFDYWGQGTTLTVSSGGGGSGGGGSGGGGSGGGGSQIQLVQSGPELKKPGETVKISCKASGYTFTNYGMNWVKQAPGKGLKWMGWINTNTGEPTYAEEFKGRFAFSLETSASTAYLQINNLKNEDTATYFCARLGFGNAMDYWGQGTSVTVSSGGGGSGGGGSGGGGSDIVMTQSPSSLTVTAGEKVTMSCKSSQSLLNSGNQKNYLTWYQQKPGQPPKLLIYWASTRESGVPDRFTGSGSGTDFTLTISSVQAEDLAVYYCQNDYSYPLTFGAGTKLELK

SEQ ID NO: 448 - protein, 754 aa, Artificial Sequence
  synthesized
MALPVTALLLPLALLLHAARPDIVMTQSPSSLTVTAGEKVTMSCKSSQSLLNSGNQKNYLTWYQQKPGQPPKLLIYWASTRESGVPDRFTGSGSGTDFTLTISSVQAEDLAVYYCQNDYSYPFTFGSGTKLEIKGGGGSGGGGSGGGGSQVQLQQPGAELVRPGASVKLSCKASGYTFTSYWINWVKQRPGQGLEWIGNIYPSDSYTNYNQKFKDKATLTVDKSSSTAYMQLSSPTSEDSAVYYCTRSWRGNSFDYWGQGTTLTVSSGGGGSGGGGSGGGGSGGGGSDIVMTQSPSSLTVTAGEKVTMICKSSQSLLNSGDQKNYLTWYQQKPGQPPKLLIFWASTRESGVPDRFTGSGSGTDFTLTISSVQAEDLAVYYCQNDYSYPLTFGAGTKLELKGGGGSGGGGSGGGGSQVQLQQSDAELVKPGSSVKISCKASGYTFTDHAIHWVKQKPEQGLEWIGHFSPGNTDIKYNDKFKGKATLTVDRSSSTAYMQLNSLTSEDSAVYFCKTSTFFFDYWGQGTTLTVSSTTTPAPRPPTPAPTIASQPLSLRPEACRPAAGGAVHTRGLDFACDIYIWAPLAGTCGVLLLSLVITLYCKRGRKKLLYIFKQPFMRPVQTTQEEDGCSCRFPEEEEGGCELRVKFSRSADAPAYQQGQNQLYNELNLGRREEYDVLDKRRGRDPEMGGKPRRKNPQEGLYNELQKDKMAEAYSEIGMKGERRRGKGHDGLYQGLSTATKDTYDALHMQALPPR

SEQ ID NO: 449 - protein, 754 aa, Artificial Sequence
  synthesized
MALPVTALLLPLALLLHAARPDIVMTQSPSSLTVTAGEKVTMSCKSSQSLLNSGNQKNYLTWYQQKPGQPPKLLIYWASTRESGVPDRFTGSGSGTDFTLTISSVQAEDLAVYYCQNDYSYPFTFGSGTKLEIKGGGGSGGGGSGGGGSQVQLQQPGAELVRPGASVKLSCKASGYTFTSYWINWVKQRPGQGLEWIGNIYPSDSYTNYNQKFKDKATLTVDKSSSTAYMQLSSPTSEDSAVYYCTRSWRGNSFDYWGQGTTLTVSSGGGGSGGGGSGGGGSGGGGSQVQLQQSDAELVKPGSSVKISCKASGYTFTDHAIHWVKQKPEQGLEWIGHFSPGNTDIKYNDKFKGKATLTVDRSSSTAYMQLNSLTSEDSAVYFCKTSTFFFDYWGQGTTLTVSSGGGGSGGGGSGGGGSDIVMTQSPSSLTVTAGEKVTMICKSSQSLLNSGDQKNYLTWYQQKPGQPPKLLIFWASTRESGVPDRFTGSGSGTDFTLTISSVQAEDLAVYYCQNDYSYPLTFGAGTKLELKTTTPAPRPPTPAPTIASQPLSLRPEACRPAAGGAVHTRGLDFACDIYIWAPLAGTCGVLLLSLVITLYCKRGRKKLLYIFKQPFMRPVQTTQEEDGCSCRFPEEEEGGCELRVKFSRSADAPAYQQGQNQLYNELNLGRREEYDVLDKRRGRDPEMGGKPRRKNPQEGLYNELQKDKMAEAYSEIGMKGERRRGKGHDGLYQGLSTATKDTYDALHMQALPPR

SEQ ID NO: 450 - protein, 754 aa, Artificial Sequence
  synthesized
MALPVTALLLPLALLLHAARPDIVMTQSPSSLTVTAGEKVTMSCKSSQSLLNSGNQKNYLTWYQQKPGQPPKLLIYWASTRESGVPDRFTGSGSGTDFTLTISSVQAEDLAVYYCQNDYSYPLTFGAGTKLELKGGGGSGGGGSGGGGSQIQLVQSGPELKKPGETVKISCKASGYTFTNYGMNWVKQAPGKGLKWMGWINTNTGEPTYAEEFKGRFAFSLETSASTAYLQINNLKNEDTATYFCARLGFGNAMDYWGQGTSVTVSSGGGGSGGGGSGGGGSGGGGSDIVMTQSPSSLTVTAGEKVTMICKSSQSLLNSGDQKNYLTWYQQKPGQPPKLLIFWASTRESGVPDRFTGSGSGTDFTLTISSVQAEDLAVYYCQNDYSYPLTFGAGTKLELKGGGGSGGGGSGGGGSQVQLQQSDAELVKPGSSVKISCKASGYTFTDHAIHWVKQKPEQGLEWIGHFSPGNTDIKYNDKFKGKATLTVDRSSSTAYMQLNSLTSEDSAVYFCKTSTFFFDYWGQGTTLTVSSTTTPAPRPPTPAPTIASQPLSLRPEACRPAAGGAVHTRGLDFACDIYIWAPLAGTCGVLLLSLVITLYCKRGRKKLLYIFKQPFMRPVQTTQEEDGCSCRFPEEEEGGCELRVKFSRSADAPAYQQGQNQLYNELNLGRREEYDVLDKRRGRDPEMGGKPRRKNPQEGLYNELQKDKMAEAYSEIGMKGERRRGKGHDGLYQGLSTATKDTYDALHMQALPPR

SEQ ID NO: 451 - protein, 754 aa, Artificial Sequence
  synthesized
MALPVTALLLPLALLLHAARPDIVMTQSPSSLTVTAGEKVTMSCKSSQSLLNSGNQKNYLTWYQQKPGQPPKLLIYWASTRESGVPDRFTGSGSGTDFTLTISSVQAEDLAVYYCQNDYSYPLTFGAGTKLELKGGGGSGGGGSGGGGSQIQLVQSGPELKKPGETVKISCKASGYTFTNYGMNWVKQAPGKGLKWMGWINTNTGEPTYAEEFKGRFAFSLETSASTAYLQINNLKNEDTATYFCARLGFGNAMDYWGQGTSVTVSSGGGGSGGGGSGGGGSGGGGSQVQLQQSDAELVKPGSSVKISCKASGYTFTDHAIHWVKQKPEQGLEWIGHFSPGNTDIKYNDKFKGKATLTVDRSSSTAYMQLNSLTSEDSAVYFCKTSTFFFDYWGQGTTLTVSSGGGGSGGGGSGGGGSDIVMTQSPSSLTVTAGEKVTMICKSSQSLLNSGDQKNYLTWYQQKPGQPPKLLIFWASTRESGVPDRFTGSGSGTDFTLTISSVQAEDLAVYYCQNDYSYPLTFGAGTKLELKTTTPAPRPPTPAPTIASQPLSLRPEACRPAAGGAVHTRGLDFACDIYIWAPLAGTCGVLLLSLVITLYCKRGRKKLLYIFKQPFMRPVQTTQEEDGCSCRFPEEEEGGCELRVKFSRSADAPAYQQGQNQLYNELNLGRREEYDVLDKRRGRDPEMGGKPRRKNPQEGLYNELQKDKMAEAYSEIGMKGERRRGKGHDGLYQGLSTATKDTYDALHMQALPPR

SEQ ID NO: 452 - protein, 754 aa, Artificial Sequence
  synthesized
MALPVTALLLPLALLLHAARPDIVMTQSPSSLTVTAGEKVTMICKSSQSLLNSGDQKNYLTWYQQKPGQPPKLLIFWASTRESGVPDRFTGSGSGTDFTLTISSVQAEDLAVYYCQNDYSYPLTFGAGTKLELKGGGGSGGGGSGGGGSQVQLQQSDAELVKPGSSVKISCKASGYTFTDHAIHWVKQKPEQGLEWIGHFSPGNTDIKYNDKFKGKATLTVDRSSSTAYMQLNSLTSEDSAVYFCKTSTFFFDYWGQGTTLTVSSGGGGSGGGGSGGGGSGGGGSDIVMTQSPSSLTVTAGEKVTMSCKSSQSLLNSGNQKNYLTWYQQKPGQPPKLLIYWASTRESGVPDRFTGSGSGTDFTLTISSVQAEDLAVYYCQNDYSYPFTFGSGTKLEIKGGGGSGGGGSGGGGSQVQLQQPGAELVRPGASVKLSCKASGYTFTSYWINWVKQRPGQGLEWIGNIYPSDSYTNYNQKFKDKATLTVDKSSSTAYMQLSSPTSEDSAVYYCTRSWRGNSFDYWGQGTTLTVSSTTTPAPRPPTPAPTIASQPLSLRPEACRPAAGGAVHTRGLDFACDIYIWAPLAGTCGVLLLSLVITLYCKRGRKKLLYIFKQPFMRPVQTTQEEDGCSCRFPEEEEGGCELRVKFSRSADAPAYQQGQNQLYNELNLGRREEYDVLDKRRGRDPEMGGKPRRKNPQEGLYNELQKDKMAEAYSEIGMKGERRRGKGHDGLYQGLSTATKDTYDALHMQALPPR

SEQ ID NO: 453 - protein, 754 aa, Artificial Sequence
  synthesized
MALPVTALLLPLALLLHAARPDIVMTQSPSSLTVTAGEKVTMICKSSQSLLNSGDQKNYLTWYQQKPGQPPKLLIFWASTRESGVPDRFTGSGSGTDFTLTISSVQAEDLAVYYCQNDYSYPLTFGAGTKLELKGGGGSGGGGSGGGGSQVQLQQSDAELVKPGSSVKISCKASGYTFTDHAIHWVKQKPEQGLEWIGHFSPGNTDIKYNDKFKGKATLTVDRSSSTAYMQLNSLTSEDSAVYFCKTSTFFFDYWGQGTTLTVSSGGGGSGGGGSGGGGSGGGGSQVQLQQPGAELVRPGASVKLSCKASGYTFTSYWINWVKQRPGQGLEWIGNIYPSDSYTNYNQKFKDKATLTVDKSSSTAYMQLSSPTSEDSAVYYCTRSWRGNSFDYWGQGTTLTVSSGGGGSGGGGSGGGGSDIVMTQSPSSLTVTAGEKVTMSCKSSQSLLNSGNQKNYLTWYQQKPGQPPKLLIYWASTRESGVPDRFTGSGSGTDFTLTISSVQAEDLAVYYCQNDYSYPFTFGSGTKLEIKTTTPAPRPPTPAPTIASQPLSLRPEACRPAAGGAVHTRGLDFACDIYIWAPLAGTCGVLLLSLVITLYCKRGRKKLLYIFKQPFMRPVQTTQEEDGCSCRFPEEEEGGCELRVKFSRSADAPAYQQGQNQLYNELNLGRREEYDVLDKRRGRDPEMGGKPRRKNPQEGLYNELQKDKMAEAYSEIGMKGERRRGKGHDGLYQGLSTATKDTYDALHMQALPPR

SEQ ID NO: 454 - protein, 754 aa, Artificial Sequence
  synthesized
MALPVTALLLPLALLLHAARPDIVMTQSPSSLTVTAGEKVTMICKSSQSLLNSGDQKNYLTWYQQKPGQPPKLLIFWASTRESGVPDRFTGSGSGTDFTLTISSVQAEDLAVYYCQNDYSYPLTFGAGTKLELKGGGGSGGGGSGGGGSQVQLQQSDAELVKPGSSVKISCKASGYTFTDHAIHWVKQKPEQGLEWIGHFSPGNTDIKYNDKFKGKATLTVDRSSSTAYMQLNSLTSEDSAVYFCKTSTFFFDYWGQGTTLTVSSGGGGSGGGGSGGGGSGGGGSDIVMTQSPSSLTVTAGEKVTMSCKSSQSLLNSGNQKNYLTWYQQKPGQPPKLLIYWASTRESGVPDRFTGSGSGTDFTLTISSVQAEDLAVYYCQNDYSYPLTFGAGTKLELKGGGGSGGGGSGGGGSQIQLVQSGPELKKPGETVKISCKASGYTFTNYGMNWVKQAPGKGLKWMGWINTNTGEPTYAEEFKGRFAFSLETSASTAYLQINNLKNEDTATYFCARLGFGNAMDYWGQGTSVTVSSTTTPAPRPPTPAPTIASQPLSLRPEACRPAAGGAVHTRGLDFACDIYIWAPLAGTCGVLLLSLVITLYCKRGRKKLLYIFKQPFMRPVQTTQEEDGCSCRFPEEEEGGCELRVKFSRSADAPAYQQGQNQLYNELNLGRREEYDVLDKRRGRDPEMGGKPRRKNPQEGLYNELQKDKMAEAYSEIGMKGERRRGKGHDGLYQGLSTATKDTYDALHMQALPPR

SEQ ID NO: 455 - protein, 754 aa, Artificial Sequence
  synthesized
MALPVTALLLPLALLLHAARPDIVMTQSPSSLTVTAGEKVTMICKSSQSLLNSGDQKNYLTWYQQKPGQPPKLLIFWASTRESGVPDRFTGSGSGTDFTLTISSVQAEDLAVYYCQNDYSYPLTFGAGTKLELKGGGGSGGGGSGGGGSQVQLQQSDAELVKPGSSVKISCKASGYTFTDHAIHWVKQKPEQGLEWIGHFSPGNTDIKYNDKFKGKATLTVDRSSSTAYMQLNSLTSEDSAVYFCKTSTFFFDYWGQGTTLTVSSGGGGSGGGGSGGGGSGGGGSQIQLVQSGPELKKPGETVKISCKASGYTFTNYGMNWVKQAPGKGLKWMGWINTNTGEPTYAEEFKGRFAFSLETSASTAYLQINNLKNEDTATYFCARLGFGNAMDYWGQGTSVTVSSGGGGSGGGGSGGGGSDIVMTQSPSSLTVTAGEKVTMSCKSSQSLLNSGNQKNYLTWYQQKPGQPPKLLIYWASTRESGVPDRFTGSGSGTDFTLTISSVQAEDLAVYYCQNDYSYPLTFGAGTKLELKTTTPAPRPPTPAPTIASQPLSLRPEACRPAAGGAVHTRGLDFACDIYIWAPLAGTCGVLLLSLVITLYCKRGRKKLLYIFKQPFMRPVQTTQEEDGCSCRFPEEEEGGCELRVKFSRSADAPAYQQGQNQLYNELNLGRREEYDVLDKRRGRDPEMGGKPRRKNPQEGLYNELQKDKMAEAYSEIGMKGERRRGKGHDGLYQGLSTATKDTYDALHMQALPPR

SEQ ID NO: 456 - protein, 753 aa, Artificial Sequence
  synthesized
MALPVTALLLPLALLLHAARPDIVMTQSPSSLTVTAGEKVTMSCKSSQSLLNSGNQKNYLTWYQQKPGQPPKLLIYWASTRESGVPDRFTGSGSGTDFTLTISSVQAEDLAVYYCQNDYSYPFTFGSGTKLEIKGGGGSGGGGSGGGGSQVQLQQPGAELVRPGASVKLSCKASGYTFTSYWINWVKQRPGQGLEWIGNIYPSDSYTNYNQKFKDKATLTVDKSSSTAYMQLSSPTSEDSAVYYCTRSWRGNSFDYWGQGTTLTVSSGGGGSGGGGSGGGGSGGGGSDIVMTQSPSSLTVTAGEKVTMICKSSQSLLNSGDQKNYLTWYQQKPGQPPKLLIFWASTRESGVPDRFTGSGSGTDFTLTISSVQAEDLAVYYCQNDYSYPLTFGAGTKLELKGGGGSGGGGSGGGGSQVQLQQSDAELVKPGSSVKISCKASGYTFTDHAIHWVKQKPEQGLEWIGHFSPGNTDIKYNDKFKGKATLTVDRSSSTAYMQLNSLTSEDSAVYFCKTSTFFFDYWGQGTTLTVSSAAAIEVMYPPPYLDNEKSNGTIIHVKGKHLCPSPLFPGPSKPFWVLVVVGGVLACYSLLVTVAFIIFWVRSKRSRLLHSDYMNMTPRRPGPTRKHYQPYAPPRDFAAYRSRVKFSRSADAPAYQQGQNQLYNELNLGRREEYDVLDKRRGRDPEMGGKPRRKNPQEGLYNELQKDKMAEAYSEIGMKGERRRGKGHDGLYQGLSTATKDTYDALHMQALPPR

SEQ ID NO: 457 - protein, 753 aa, Artificial Sequence
  synthesized
MALPVTALLLPLALLLHAARPDIVMTQSPSSLTVTAGEKVTMSCKSSQSLLNSGNQKNYLTWYQQKPGQPPKLLIYWASTRESGVPDRFTGSGSGTDFTLTISSVQAEDLAVYYCQNDYSYPFTFGSGTKLEIKGGGGSGGGGSGGGGSQVQLQQPGAELVRPGASVKLSCKASGYTFTSYWINWVKQRPGQGLEWIGNIYPSDSYTNYNQKFKDKATLTVDKSSSTAYMQLSSPTSEDSAVYYCTRSWRGNSFDYWGQGTTLTVSSGGGGSGGGGSGGGGSGGGGSQVQLQQSDAELVKPGSSVKISCKASGYTFTDHAIHWVKQKPEQGLEWIGHFSPGNTDIKYNDKFKGKATLTVDRSSSTAYMQLNSLTSEDSAVYFCKTSTFFFDYWGQGTTLTVSSGGGGSGGGGSGGGGSDIVMTQSPSSLTVTAGEKVTMICKSSQSLLNSGDQKNYLTWYQQKPGQPPKLLIFWASTRESGVPDRFTGSGSGTDFTLTISSVQAEDLAVYYCQNDYSYPLTFGAGTKLELKAAAIEVMYPPPYLDNEKSNGTIIHVKGKHLCPSPLFPGPSKPFWVLVVVGGVLACYSLLVTVAFIIFWVRSKRSRLLHSDYMNMTPRRPGPTRKHYQPYAPPRDFAAYRSRVKFSRSADAPAYQQGQNQLYNELNLGRREEYDVLDKRRGRDPEMGGKPRRKNPQEGLYNELQKDKMAEAYSEIGMKGERRRGKGHDGLYQGLSTATKDTYDALHMQALPPR

SEQ ID NO: 458 - protein, 753 aa, Artificial Sequence
  synthesized
MALPVTALLLPLALLLHAARPDIVMTQSPSSLTVTAGEKVTMSCKSSQSLLNSGNQKNYLTWYQQKPGQPPKLLIYWASTRESGVPDRFTGSGSGTDFTLTISSVQAEDLAVYYCQNDYSYPLTFGAGTKLELKGGGGSGGGGSGGGGSQIQLVQSGPELKKPGETVKISCKASGYTFTNYGMNWVKQAPGKGLKWMGWINTNTGEPTYAEEFKGRFAFSLETSASTAYLQINNLKNEDTATYFCARLGFGNAMDYWGQGTSVTVSSGGGGSGGGGSGGGGSGGGGSDIVMTQSPSSLTVTAGEKVTMICKSSQSLLNSGDQKNYLTWYQQKPGQPPKLLIFWASTRESGVPDRFTGSGSGTDFTLTISSVQAEDLAVYYCQNDYSYPLTFGAGTKLELKGGGGSGGGGSGGGGSQVQLQQSDAELVKPGSSVKISCKASGYTFTDHAIHWVKQKPEQGLEWIGHFSPGNTDIKYNDKFKGKATLTVDRSSSTAYMQLNSLTSEDSAVYFCKTSTFFFDYWGQGTTLTVSSAAAIEVMYPPPYLDNEKSNGTIIHVKGKHLCPSPLFPGPSKPFWVLVVVGGVLACYSLLVTVAFIIFWVRSKRSRLLHSDYMNMTPRRPGPTRKHYQPYAPPRDFAAYRSRVKFSRSADAPAYQQGQNQLYNELNLGRREEYDVLDKRRGRDPEMGGKPRRKNPQEGLYNELQKDKMAEAYSEIGMKGERRRGKGHDGLYQGLSTATKDTYDALHMQALPPR

SEQ ID NO: 459 - protein, 753 aa, Artificial Sequence
  synthesized
MALPVTALLLPLALLLHAARPDIVMTQSPSSLTVTAGEKVTMSCKSSQSLLNSGNQKNYLTWYQQKPGQPPKLLIYWASTRESGVPDRFTGSGSGTDFTLTISSVQAEDLAVYYCQNDYSYPLTFGAGTKLELKGGGGSGGGGSGGGGSQIQLVQSGPELKKPGETVKISCKASGYTFTNYGMNWVKQAPGKGLKWMGWINTNTGEPTYAEEFKGRFAFSLETSASTAYLQINNLKNEDTATYFCARLGFGNAMDYWGQGTSVTVSSGGGGSGGGGSGGGGSGGGGSQVQLQQSDAELVKPGSSVKISCKASGYTFTDHAIHWVKQKPEQGLEWIGHFSPGNTDIKYNDKFKGKATLTVDRSSSTAYMQLNSLTSEDSAVYFCKTSTFFFDYWGQGTTLTVSSGGGGSGGGGSGGGGSDIVMTQSPSSLTVTAGEKVTMICKSSQSLLNSGDQKNYLTWYQQKPGQPPKLLIFWASTRESGVPDRFTGSGSGTDFTLTISSVQAEDLAVYYCQNDYSYPLTFGAGTKLELKAAAIEVMYPPPYLDNEKSNGTIIHVKGKHLCPSPLFPGPSKPFWVLVVVGGVLACYSLLVTVAFIIFWVRSKRSRLLHSDYMNMTPRRPGPTRKHYQPYAPPRDFAAYRSRVKFSRSADAPAYQQGQNQLYNELNLGRREEYDVLDKRRGRDPEMGGKPRRKNPQEGLYNELQKDKMAEAYSEIGMKGERRRGKGHDGLYQGLSTATKDTYDALHMQALPPR

SEQ ID NO: 460 - protein, 753 aa, Artificial Sequence
  synthesized
MALPVTALLLPLALLLHAARPDIVMTQSPSSLTVTAGEKVTMICKSSQSLLNSGDQKNYLTWYQQKPGQPPKLLIFWASTRESGVPDRFTGSGSGTDFTLTISSVQAEDLAVYYCQNDYSYPLTFGAGTKLELKGGGGSGGGGSGGGGSQVQLQQSDAELVKPGSSVKISCKASGYTFTDHAIHWVKQKPEQGLEWIGHFSPGNTDIKYNDKFKGKATLTVDRSSSTAYMQLNSLTSEDSAVYFCKTSTFFFDYWGQGTTLTVSSGGGGSGGGGSGGGGSGGGGSDIVMTQSPSSLTVTAGEKVTMSCKSSQSLLNSGNQKNYLTWYQQKPGQPPKLLIYWASTRESGVPDRFTGSGSGTDFTLTISSVQAEDLAVYYCQNDYSYPFTFGSGTKLEIKGGGGSGGGGSGGGGSQVQLQQPGAELVRPGASVKLSCKASGYTFTSYWINWVKQRPGQGLEWIGNIYPSDSYTNYNQKFKDKATLTVDKSSSTAYMQLSSPTSEDSAVYYCTRSWRGNSFDYWGQGTTLTVSSAAAIEVMYPPPYLDNEKSNGTIIHVKGKHLCPSPLFPGPSKPFWVLVVVGGVLACYSLLVTVAFIIFWVRSKRSRLLHSDYMNMTPRRPGPTRKHYQPYAPPRDFAAYRSRVKFSRSADAPAYQQGQNQLYNELNLGRREEYDVLDKRRGRDPEMGGKPRRKNPQEGLYNELQKDKMAEAYSEIGMKGERRRGKGHDGLYQGLSTATKDTYDALHMQALPPR

SEQ ID NO: 461 - protein, 753 aa, Artificial Sequence
  synthesized
MALPVTALLLPLALLLHAARPDIVMTQSPSSLTVTAGEKVTMICKSSQSLLNSGDQKNYLTWYQQKPGQPPKLLIFWASTRESGVPDRFTGSGSGTDFTLTISSVQAEDLAVYYCQNDYSYPLTFGAGTKLELKGGGGSGGGGSGGGGSQVQLQQSDAELVKPGSSVKISCKASGYTFTDHAIHWVKQKPEQGLEWIGHFSPGNTDIKYNDKFKGKATLTVDRSSSTAYMQLNSLTSEDSAVYFCKTSTFFFDYWGQGTTLTVSSGGGGSGGGGSGGGGSGGGGSQVQLQQPGAELVRPGASVKLSCKASGYTFTSYWINWVKQRPGQGLEWIGNIYPSDSYTNYNQKFKDKATLTVDKSSSTAYMQLSSPTSEDSAVYYCTRSWRGNSFDYWGQGTTLTVSSGGGGSGGGGSGGGGSDIVMTQSPSSLTVTAGEKVTMSCKSSQSLLNSGNQKNYLTWYQQKPGQPPKLLIYWASTRESGVPDRFTGSGSGTDFTLTISSVQAEDLAVYYCQNDYSYPFTFGSGTKLEIKAAAIEVMYPPPYLDNEKSNGTIIHVKGKHLCPSPLFPGPSKPFWVLVVVGGVLACYSLLVTVAFIIFWVRSKRSRLLHSDYMNMTPRRPGPTRKHYQPYAPPRDFAAYRSRVKFSRSADAPAYQQGQNQLYNELNLGRREEYDVLDKRRGRDPEMGGKPRRKNPQEGLYNELQKDKMAEAYSEIGMKGERRRGKGHDGLYQGLSTATKDTYDALHMQALPPR

SEQ ID NO: 462 - protein, 753 aa, Artificial Sequence
  synthesized
MALPVTALLLPLALLLHAARPDIVMTQSPSSLTVTAGEKVTMICKSSQSLLNSGDQKNYLTWYQQKPGQPPKLLIFWASTRESGVPDRFTGSGSGTDFTLTISSVQAEDLAVYYCQNDYSYPLTFGAGTKLELKGGGGSGGGGSGGGGSQVQLQQSDAELVKPGSSVKISCKASGYTFTDHAIHWVKQKPEQGLEWIGHFSPGNTDIKYNDKFKGKATLTVDRSSSTAYMQLNSLTSEDSAVYFCKTSTFFFDYWGQGTTLTVSSGGGGSGGGGSGGGGSGGGGSDIVMTQSPSSLTVTAGEKVTMSCKSSQSLLNSGNQKNYLTWYQQKPGQPPKLLIYWASTRESGVPDRFTGSGSGTDFTLTISSVQAEDLAVYYCQNDYSYPLTFGAGTKLELKGGGGSGGGGSGGGGSQIQLVQSGPELKKPGETVKISCKASGYTFTNYGMNWVKQAPGKGLKWMGWINTNTGEPTYAEEFKGRFAFSLETSASTAYLQINNLKNEDTATYFCARLGFGNAMDYWGQGTSVTVSSAAAIEVMYPPPYLDNEKSNGTIIHVKGKHLCPSPLFPGPSKPFWVLVVVGGVLACYSLLVTVAFIIFWVRSKRSRLLHSDYMNMTPRRPGPTRKHYQPYAPPRDFAAYRSRVKFSRSADAPAYQQGQNQLYNELNLGRREEYDVLDKRRGRDPEMGGKPRRKNPQEGLYNELQKDKMAEAYSEIGMKGERRRGKGHDGLYQGLSTATKDTYDALHMQALPPR

SEQ ID NO: 463 - protein, 753 aa, Artificial Sequence
  synthesized
MALPVTALLLPLALLLHAARPDIVMTQSPSSLTVTAGEKVTMICKSSQSLLNSGDQKNYLTWYQQKPGQPPKLLIFWASTRESGVPDRFTGSGSGTDFTLTISSVQAEDLAVYYCQNDYSYPLTFGAGTKLELKGGGGSGGGGSGGGGSQVQLQQSDAELVKPGSSVKISCKASGYTFTDHAIHWVKQKPEQGLEWIGHFSPGNTDIKYNDKFKGKATLTVDRSSSTAYMQLNSLTSEDSAVYFCKTSTFFFDYWGQGTTLTVSSGGGGSGGGGSGGGGSGGGGSQIQLVQSGPELKKPGETVKISCKASGYTFTNYGMNWVKQAPGKGLKWMGWINTNTGEPTYAEEFKGRFAFSLETSASTAYLQINNLKNEDTATYFCARLGFGNAMDYWGQGTSVTVSSGGGGSGGGGSGGGGSDIVMTQSPSSLTVTAGEKVTMSCKSSQSLLNSGNQKNYLTWYQQKPGQPPKLLIYWASTRESGVPDRFTGSGSGTDFTLTISSVQAEDLAVYYCQNDYSYPLTFGAGTKLELKAAAIEVMYPPPYLDNEKSNGTIIHVKGKHLCPSPLFPGPSKPFWVLVVVGGVLACYSLLVTVAFIIFWVRSKRSRLLHSDYMNMTPRRPGPTRKHYQPYAPPRDFAAYRSRVKFSRSADAPAYQQGQNQLYNELNLGRREEYDVLDKRRGRDPEMGGKPRRKNPQEGLYNELQKDKMAEAYSEIGMKGERRRGKGHDGLYQGLSTATKDTYDALHMQALPPR

SEQ ID NO: 464 - protein, 242 aa, Artificial Sequence; identical to SEQ ID NO: 5
  synthesized

SEQ ID NO: 465 - protein, 242 aa, Artificial Sequence
  synthesized
EVQLVESGGGLVQPGGSLRLSCAASGVSLPDYGVSWVRQAPGKGLEWVSVIWGSETTYYNSALKSRFTISRDNAKNSLYLQMNSLRAEDTAVYYCAKHYYYGGSYAMDYWGQGTLVTVSSGGGGSGGGGSGGGGSDIQMTQSPSSLSASVGDRVTITCRASQDISKYLNWYQQKPGKAPKLLIYHTSRLHSGVPSRFSGSGSGTDFTLTISSLQPEDFATYYCQQGNTLPYTFGQGTKVEIK

SEQ ID NO: 466 - protein, 245 aa, Artificial Sequence
  synthesized
QSVLTQPPSVSAAPGQKVTISCSGSSSDIGSNYVSWYQQFPGTAPKLLIYDNNKRPSAIPDRFSGSKSGTSATLGITGLQTGDEADYYCGTWDSRLGIAVFGGGTQLTVLGGGGGSGGGGSGGGGSEVQLVQSGAEVKKPGQSLKISCKASGYSLTDNWIGWVRQKPGKGLEWMGIIYPGDSDTRYSPSFQGQVTISADKSINTAYLQWSSLKASDTAIYYCVGLDWNYNPLRYWGPGTLVTVSS

SEQ ID NO: 467 - protein, 245 aa, Artificial Sequence
  synthesized
EVQLVQSGAEVKKPGQSLKISCKASGYSLTDNWIGWVRQKPGKGLEWMGIIYPGDSDTRYSPSFQGQVTISADKSINTAYLQWSSLKASDTAIYYCVGLDWNYNPLRYWGPGTLVTVSSGGGGGSGGGGSGGGGSQSVLTQPPSVSAAPGQKVTISCSGSSSDIGSNYVSWYQQFPGTAPKLLIYDNNKRPSAIPDRFSGSKSGTSATLGITGLQTGDEADYYCGTWDSRLGIAVFGGGTQLTVL

SEQ ID NO: 468 - protein, 241 aa, Artificial Sequence; identical to SEQ ID NO: 11
  synthesized

SEQ ID NO: 469 - protein, 241 aa, Artificial Sequence
  synthesized
QVQLQQWGAGLLKPSETLSLTCAVFGGSFSGYYWSWIRQPPGKGLEWIGEINHRGNTNDNPSLKSRVTISVDTSKNQFALKLSSVTAADTAVYYCARERGYTYGNFDHWGQGTLVTVSSGGGGSGGGGSGGGGSEIVMTQSPATLSVSPGERATLSCRASQSVSRNLAWYQQKPGQAPRLLIYGASTRATGIPARFSGSGSGTEFTLTIGSLQSEDFAVYYCQQYKTWPRTFGQGTNVEIK

SEQ ID NO: 470 - protein, 243 aa, Artificial Sequence
  synthesized
QSVLTQPASVSGSPGQSVTISCTGTSSDVGGYNYVSWYQQHPGKPPKLMIYEVSKRPSGVPDRFSGSKSGNTASLTISGLQAEDEADYYCSSHTSSNTLIFGGGTKVTVLGGGGSGGGGSGGGGSEVQLVQSGAEVKKPGESLKISCKGSGYTFTNYWIGWVRQMPGKGLEWMGRIYPSDSYTNYSPSFQGQVTISADKSISTAYLQWSSLKASDTAMYYCARDLEPTHHYSWGQGTLVTVSS

SEQ ID NO: 471 - protein, 243 aa, Artificial Sequence
  synthesized
EVQLVQSGAEVKKPGESLKISCKGSGYTFTNYWIGWVRQMPGKGLEWMGRIYPSDSYTNYSPSFQGQVTISADKSISTAYLQWSSLKASDTAMYYCARDLEPTHHYSWGQGTLVTVSSGGGGSGGGGSGGGGSQSVLTQPASVSGSPGQSVTISCTGTSSDVGGYNYVSWYQQHPGKPPKLMIYEVSKRPSGVPDRFSGSKSGNTASLTISGLQAEDEADYYCSSHTSSNTLIFGGGTKVTVL

SEQ ID NO: 472 - protein, 236 aa, Artificial Sequence
  synthesized
SIVMTQSPATLSVTPGDRVSLSCRASQSIGDYLHWFQQKSHESPRLLIKYASQSISGIPSRFSGSGSGSDFTLIINTMEPEDVGVYYCQNAHTYPYTFGGGTKLEIKGGGGSGGGGSGGGGSQVKLQQSGPELVRPGASVKMSCKASGYTFTTYWMHWVKQRPGQGLEWIGMIDPSNSDTRLNQKFKDKATLNVDTSSNTAYMHLSSLTSEDSAVYYCTLGGTEYWGQGATLTVSS

SEQ ID NO: 473 - protein, 236 aa, Artificial Sequence
  synthesized
QVKLQQSGPELVRPGASVKMSCKASGYTFTTYWMHWVKQRPGQGLEWIGMIDPSNSDTRLNQKFKDKATLNVDTSSNTAYMHLSSLTSEDSAVYYCTLGGTEYWGQGATLTVSSGGGGSGGGGSGGGGSSIVMTQSPATLSVTPGDRVSLSCRASQSIGDYLHWFQQKSHESPRLLIKYASQSISGIPSRFSGSGSGSDFTLIINTMEPEDVGVYYCQNAHTYPYTFGGGTKLEIK

SEQ ID NO: 474 - protein, 242 aa, Artificial Sequence
  synthesized
SIVMTQTPLTLSVTIGQPASISCKSSQSLLYSDGQTYLNWLLQRPGQSPKRLIYLVSKLDSGVPDRFTGSGSGTDFTLKISRVEAEDLGVYYCVQTTHFPYTFGGGTKLEMKGGGGSGGGGSGGGGSQVQLKESGGGLVQPGESLKLSCESSEFPFPSHDMSWVRKTPEKRLELVAAINSDGGSTYYPDTMERRFIISRDNTKKTLYLQMSSLRSEDTALYYCASLPTFAYWGQGTLVTVSA

SEQ ID NO: 475 - protein, 242 aa, Artificial Sequence
  synthesized
QVQLKESGGGLVQPGESLKLSCESSEFPFPSHDMSWVRKTPEKRLELVAAINSDGGSTYYPDTMERRFIISRDNTKKTLYLQMSSLRSEDTALYYCASLPTFAYWGQGTLVTVSAGGGGSGGGGSGGGGSSIVMTQTPLTLSVTIGQPASISCKSSQSLLYSDGQTYLNWLLQRPGQSPKRLIYLVSKLDSGVPDRFTGSGSGTDFTLKISRVEAEDLGVYYCVQTTHFPYTFGGGTKLEMK

SEQ ID NO: 476 - protein, 237 aa, Artificial Sequence
  synthesized
DIVMTQSHKFMSTSVGDRVSIICKASQDVGTAVDWYQQKPGQSPKLLIYWASTRHTGVPDRFTGSGSGTDFTLAITNVQSEDLADYFCQQYNSYPLTFGAGTKLEIKGGGGSGGGGSGGGGSEVQLQQSGPELVKPGTSVRISCKTSGYTFTEYTIHWVKQSHGKSLEWIGNINPNNGGTTYNQKFEDKATLTVDKSSSTAYMELRSLTSEDSAVYYCAAGWNFDYWGQGTTLTVSS

SEQ ID NO: 477 - protein, 237 aa, Artificial Sequence
  synthesized
EVQLQQSGPELVKPGTSVRISCKTSGYTFTEYTIHWVKQSHGKSLEWIGNINPNNGGTTYNQKFEDKATLTVDKSSSTAYMELRSLTSEDSAVYYCAAGWNFDYWGQGTTLTVSSGGGGSGGGGSGGGGSDIVMTQSHKFMSTSVGDRVSIICKASQDVGTAVDWYQQKPGQSPKLLIYWASTRHTGVPDRFTGSGSGTDFTLAITNVQSEDLADYFCQQYNSYPLTFGAGTKLEIK

SEQ ID NO: 478 - protein, 245 aa, Artificial Sequence
  Synthesized
DIQMTRAPDSLSASVGDRVTITCRASQGVDIYVAWYQQKPGKAPKLLMHSASTLASGVPSRFSGRGSGTDFTLTINSLQAEDVATYYCQSHNSAVVTFGQGTRLEIKGGGGSGGGGSGGGGSEVQLLESGGGLVQPGGSLRLSCAASGFTFSRYVMVWVRQAPGKGLDWVSGISPSGGVTRYADSVKGRFTISRDNSKNTLYLQMNSLRAEDTAMYYCARIRKEMTTISYFFDYWGQGTLVTVSS

SEQ ID NO: 479 - protein, 246 aa, Artificial Sequence
  Synthesized
QIVLTQSPAIMSASLGERVTMTCTASSSVNSFYLHWYQQKPGSSPKLWIHSTSNLASGVPGRFSGSGSGTSYSLTISSMEAEDAATYYCHQYHRSPYTFGGGTKLEIKGGGGSGGGGSGGGGSQVQLQQSGAELMKPGASVKISCKATGYTFSSYWIEWVKQRPGHGLEWIGEILPGSGNTYYNERFKDKATFTADTSSNTAYMQLSSLTSEDSAVYYCARRAAAYYSNPEWFAYWGQGTLVTVSA

SEQ ID NO: 480 - DNA, 9780 bp, Artificial Sequence
  Synthesized
cggctccggtgcccgtcagtgggcagagcgcacatcgcccacagtccccgagaagttggggggaggggtcggcaattgaaccggtgcctagagaaggtggcgcggggtaaactgggaaagtgatgtcgtgtactggctccgcctttttcccgagggtgggggagaaccgtatataagtgcagtagtcgccgtgaacgttctttttcgcaacgggtttgccgccagaacacaggatccgccaccatggccttaccagtgaccgccttgctcctgccgctggccttgctgctccacgccgccaggccggatatccagatgacccagagcccgagcagcctgagcgcgagcgtgggtgatcgcgtgaccattacctgcagggcaagtcaggacattagtaaatatttaaattggtatcagcagaaaccgggtaaagcgccgaaactgttaatttatcatacatcaagattacactcaggcgtgccgtcgcgttttagcggctcgggttcgggcaccgattttaccctgaccatctcgagcttgcagccggaggacttcgccacctactattgccaacagggtaatacgcttccgtacacgttcggtcagggcaccaaagtggagatcaaaggtggcggtggctcgggcggtggtgggtcgggtggcggcggatctgaggtgcagctggtggagtctgggggaggcttggtacagcctggggggtccctgagactctcctgtgcagcctctggagtgtccctgcctgattatggcgtgtcctgggtccgccaggctccagggaaggggctggagtgggtttcagtgatctggggcagcgagacaacctactacaacagcgccctgaagtcccgattcaccatctccagagacaatgccaagaactcactgtatctgcaaatgaacagcctgagagccgaggacacggctgtgtattactgtgcgaagcactactactacggcggcagctacgctatggactactggggccaaggaaccctggtcaccgtgtcctcaaccacgacgccagcgccgcgaccaccaacaccggcgcccaccatcgcgtcgcagcccctgtccctgcgcccagaggcgtgccggccagcggcggggggcgcagtgcacacgagggggctggacttcgcctgtgatatctacatctgggcgcccttggccgggacttgtggggtccttctcctgtcactggttatcaccctttactgcaaacggggcagaaagaaactcctgtatatattcaaacaaccatttatgagaccagtacaaactactcaagaggaagatggctgtagctgccgatttccagaagaagaagaaggaggatgtgaactgagagtgaagttcagcaggagcgcagacgcccccgcgtaccagcagggccagaaccagctctataacgagctcaatctaggacgaagagaggagtacgatgttttggacaagaggcgtggccgggaccctgagatggggggaaagccgagaaggaagaaccctcaggaaggcctgtacaatgaactgcagaaagataagatggcggaggcctacagtgagattgggatgaaaggcgagcgccggaggggcaaggggcacgatggcctttaccagggtctcagtacagccaccaaggacacctacgacgcccttcacatgcaggccctgccccctcgctaagtcgactctagaactagtaatcaacctctggattacaaaatttgtgaaagattgactggtattcttaactatgttgctccttttacgctatgtggatacgctgctttaatgcctttgtatcatgctattgcttcccgtatggctttcattttctcctccttgtataaatcctggttgctgtctctttatgaggagttgtggcccgttgtcaggcaacgtggcgtggtgtgcactgtgtttgctgacgcaacccccactggttggggcattgccaccacctgtcagctcctttccgggactttcgctttccccctccctattgccacggcggaactcatcgccgcctgccttgcccgctgctggacaggggctcggctgttgggcactgacaattccgtggtgttgtcggggaagctgacgtcctttccatggctgctcgcctgtgttgccacctggattctgcgcgggacgtccttctgctacgtcccttcggccctcaatccagcggaccttccttcccgcggcctgctgccggctctgcggcctcttccgcgtcttcgccttcgccctcagacgagtcggatctccctttgggccgcctccccgcctgccgcggaattcgagctcggtacctttaagaccaatgacttacaaggcagctgtagatcttagccactttttaaaagaaaaggggggactggaagggctaattcactcccaacgaagacaagatctgctttttgcttgtactgggtctctctggttagaccagatctgagcctgggagctctctggctaactagggaacccactgcttaagcctcaataaagcttgccttgagtgcttcaagtagtgtgtgcccgtctgttgtgtgactctggtaactagagatccctcagacccttttagtcagtgtggaaaatctctagcagtagtagttcatgtcatcttattattcagtatttataacttgcaaagaaatgaatatcagagagtgagaggaacttgtttattgcagcttataatggttacaaataaagcaatagcatcacaaatttcacaaataaagcatttttttcactgcattctagttgtggtttgtccaaactcatcaatgtatcttatcatgtctggctctagctatcccgcccctaactccgcccatcccgcccctaactccgcccagttccgcccattctccgccccatggctgactaattttttttatttatgcagaggccgaggccgcctcggcctctgagctattccagaagtagtgaggaggcttttttggaggcctagggacgtacccaattcgccctatagtgagtcgtattacgcgcgctcactggccgtcgttttacaacgtcgtgactgggaaaaccctggcgttacccaacttaatcgccttgcagcacatccccctttcgccagctggcgtaatagcgaagaggcccgcaccgatcgcccttcccaacagttgcgcagcctgaatggcgaatgggacgcgccctgtagcggcgcattaagcgcggcgggtgtggtggttacgcgcagcgtgaccgctacacttgccagcgccctagcgcccgctcctttcgctttcttcccttcctttctcgccacgttcgccggctttccccgtcaagctctaaatcgggggctccctttagggttccgatttagtgctttacggcacctcgaccccaaaaaacttgattagggtgatggttcacgtagtgggccatcgccctgatagacggtttttcgccctttgacgttggagtccacgttctttaatagtggactcttgttccaaactggaacaacactcaaccctatctcggtctattcttttgatttataagggattttgccgatttcggcctattggttaaaaaatgagctgatttaacaaaaatttaacgcgaattttaacaaaatattaacgcttacaatttaggtggcacttttcggggaaatgtgcgcggaacccctatttgtttatttttctaaatacattcaaatatgtatccgctcatgagacaataaccctgataaatgcttcaataatattgaaaaaggaagagtatgagccatattcaacgggaaacgtcttgctctaggccgcgattaaattccaacatggatgctgatttatatgggtataaatgggctcgcgataatgtcgggcaatcaggtgcgacaatctatcgattgtatgggaagcccgatgcgccagagttgtttctgaaacatggcaaaggtagcgttgccaatgatgttacagatgagatggtcagactaaactggctgacggaatttatgcctcttccgaccatcaagcattttatccgtactcctgatgatgcatggttactcaccactgcgatccccgggaaaacagcattccaggtattagaagaatatcctgattcaggtgaaaatattgttgatgcgctggcagtgttcctgcgccggttgcattcgattcctgtttgtaattgtccttttaacagcgatcgcgtatttcgtctggctcaggcgcaatcacgaatgaataacggtttggttgatgcgagtgattttgatgacgagcgtaatggctggcctgttgaacaagtctggaaagaaatgcataaacttttgccattctcaccggattcagtcgtcactcatggtgatttctcacttgataaccttatttttgacgaggggaaattaataggttgtattgatgttggacgagtcggaatcgcagaccgataccaggatcttgccatcctatggaactgcctcggtgagttttctccttcattacagaaacggctttttcaaaaatatggtattgataatcctgatatgaataaattgcagtttcatttgatgctcgatgagtttttctaactgtcagaccaagtttactcatatatactttagattgatttaaaacttcatttttaatttaaaaggatctaggtgaagatcctttttgataatctcatgaccaaaatcccttaacgtgagttttcgttccactgagcgtcagaccccgtagaaaagatcaaaggatcttcttgagatcctttttttctgcgcgtaatctgctgcttgcaaacaaaaaaaccaccgctaccagcggtggtttgtttgccggatcaagagctaccaactctttttccgaaggtaactggcttcagcagagcgcagataccaaatactgttcttctagtgtagccgtagttaggccaccacttcaagaactctgtagcaccgcctacatacctcgctctgctaatcctgttaccagtggctgctgccagtggcgataagtcgtgtcttaccgggttggactcaagacgatagttaccggataaggcgcagcggtcgggctgaacggggggttcgtgcacacagcccagcttggagcgaacgacctacaccgaactgagatacctacagcgtgagctatgagaaagcgccacgcttcccgaagggagaaaggcggacaggtatccggtaagcggcagggtcggaacaggagagcgcacgagggagcttccagggggaaacgcctggtatctttatagtcctgtcgggtttcgccacctctgacttgagcgtcgatttttgtgatgctcgtcaggggggcggagcctatggaaaaacgccagcaacgcggcctttttacggttcctggccttttgctggccttttgctcacatgttctttcctgcgttatcccctgattctgtggataaccgtattaccgcctttgagtgagctgataccgctcgccgcagccgaacgaccgagcgcagcgagtcagtgagcgaggaagcggaagagcgcccaatacgcaaaccgcctctccccgcgcgttggccgattcattaatgcagctggcacgacaggtttcccgactggaaagcgggcagtgagcgcaacgcaattaatgtgagttagctcactcattaggcaccccaggctttacactttatgcttccggctcgtatgttgtgtggaattgtgagcggataacaatttcacacaggaaacagctatgaccatgattacgccaagcgcgcaattaaccctcactaaagggaacaaaagctggagctgcaagcttaatgtagtcttatgcaatactcttgtagtcttgcaacatggtaacgatgagttagcaacatgccttacaaggagagaaaaagcaccgtgcatgccgattggtggaagtaaggtggtacgatcgtgccttattaggaaggcaacagacgggtctgacatggattggacgaaccactgaattgccgcattgcagagatattgtatttaagtgcctagctcgatacataaacgggtctctctggttagaccagatctgagcctgggagctctctggctaactagggaacccactgcttaagcctcaataaagcttgccttgagtgcttcaagtagtgtgtgcccgtctgttgtgtgactctggtaactagagatccctcagacccttttagtcagtgtggaaaatctctagcagtggcgcccgaacagggacttgaaagcgaaagggaaaccagaggagctctctcgacgcaggactcggcttgctgaagcgcgcacggcaagaggcgaggggcggcgactggtgagtacgccaaaaattttgactagcggaggctagaaggagagagatgggtgcgagagcgtcagtattaagcgggggagaattagatcgcgatgggaaaaaattcggttaaggccagggggaaagaaaaaatataaattaaaacatatagtatgggcaagcagggagctagaacgattcgcagttaatcctggcctgttagaaacatcagaaggctgtagacaaatactgggacagctacaaccatcccttcagacaggatcagaagaacttagatcattatataatacagtagcaaccctctattgtgtgcatcaaaggatagagataaaagacaccaaggaagctttagacaagatagaggaagagcaaaacaaaagtaagaccaccgcacagcaagcggccgctgatcttcagacctggaggaggagatatgagggacaattggagaagtgaattatataaatataaagtagtaaaaattgaaccattaggagtagcacccaccaaggcaaagagaagagtggtgcagagagaaaaaagagcagtgggaataggagctttgttccttgggttcttgggagcagcaggaagcactatgggcgcagcgtcaatgacgctgacggtacaggccagacaattattgtctggtatagtgcagcagcagaacaatttgctgagggctattgaggcgcaacagcatctgttgcaactcacagtctggggcatcaagcagctccaggcaagaatcctggctgtggaaagatacctaaaggatcaacagctcctggggatttggggttgctctggaaaactcatttgcaccactgctgtgccttggaatgctagttggagtaataaatctctggaacagatttggaatcacacgacctggatggagtgggacagagaaattaacaattacacaagcttaatacactccttaattgaagaatcgcaaaaccagcaagaaaagaatgaacaagaattattggaattagataaatgggcaagtttgtggaattggtttaacataacaaattggctgtggtatataaaattattcataatgatagtaggaggcttggtaggtttaagaatagtttttgctgtactttctatagtgaatagagttaggcagggatattcaccattatcgtttcagacccacctcccaaccccgaggggacccgacaggcccgaaggaatagaagaagaaggtggagagagagacagagacagatccattcgattagtgaacggatctcgacggtatcgatcacgagactagcctcgacacaaatggcagtattcatccacaattttaaaagaaaaggggggattggggggtacagtgcaggggaaagaatagtagacataatagcaacagacatacaaactaaagaattacaaaaacaaattacaaaaattcaaaattttcgggtttattacagggacagcagagatccagtttatcgacttaacttgtttattgcagcttataatggttacaaataaggcaatagcatcacaaatttcacaaataaggcatttttttcactgcattctagttttggtttgtccaaactcatcaatgtatcttatcatgtctggatctcaaatccctcggaagctgcgcctgtcttaggttggagtgatacatttttatcacttttacccgtctttggattaggcagtagctctgacggccctcctgtcttaggttagtgaaaaatgtcactctcttacccgtcattggctgtccagcttagctcgcaggggaggtggtcttcattactggctagctcttctgcctctaaacagcatctggctcctcttcctcttgccggttttagcagcggggctcagttcggccatcacttggatcagctcgtggatggcctttctctggacgttcagatcggtcacggagtagttggtgagcttctcgaagtcgtccctcttcttcttgttgctgttgaagaatttcacgttcatatcctccttgatggtctcgacgctcttctggatgctctggtcgtccttgaagttcttgaagagcttgaagtagaagctcacgatctgggactgcatgatctttctatcggactcctccttccagttcttcagaatgccgagaaacagtgtgccgttatcggccacgtcggagtggccggcattgaagtacttcttgaggttctcggcctccttcacgtaggggtcttggcagtagcagcccagagagcccagcacgatgcacagctggaaggccagaatgtagctggtgtacttcatggggccggggttctcctcgacatctccggcttgcttcagcagagagaaattggtggcgccgctgcccatttgccgaagagccctcaggctggactgcaggaactccttaaagctgcgcagaatgagatgagttgtcatgtcctgcagccactggttctgtgcctgcagcttcgtcagcaggctggcatttgtggttgggtcaggggtggttattgcatctagattctttgcctttttctgcaggaactggatcaggacttttgtactcatctgcacagctctggcttgttcctcactactctcaaatctgttctggaggtactctaggtatacctcaaactccaaaagaccagtgatgattttcaccaggcaagtctcctcattgaatccagattggaagcatccatctttttcagccatctttggaaggttcaggttgttttctgccagtgcctctttgctgctttcacacatgttactcttgttacatgtctcctttctcagggctgagatgccgtcgaggatgtaccgaatttgtttgtcaattcgttctgaagaggtgagtggctgtctgtgtggggcggctacatctttggaatcttctcctgggggtactggggcagggaaggcagcaggcaacaccaggagcagccccagggagaaggcaactggaccgaaggcgcttgtggagaaggagttcatggtggccaggagttgaggttactgtgagtagtgattaaagagagtgatagggaactcttgaacaagagatgcaatttatactgttaattctggaaaaatattatgggggtgtcaaaatgtcccgggaccaattgacgccttctgtatgaaacagtttttcctcctaattgacgccttctgtatgaaacagtttttcctcctaattgacgccttctgtatgaaacagtttttcctcctaattcgatgggaccaattgacgccttctgtatgaaacagtttttcctcctaattgacgccttctgtatgaaacagtttttcctcctaattgacgccttctgtatgaaacagtttttcctcctaattcgatatcaagcttatcgataccgtcgacctcgatgaattcgctagcaaatccactttggctcga

SEQ ID NO: 481 - DNA, 390 bp, Artificial Sequence
  Synthesized
tcgaggtcgacggtatcgataagcttgatatcgaattaggaggaaaaactgtttcatacagaaggcgtcaattaggaggaaaaactgtttcatacagaaggcgtcaattaggaggaaaaactgtttcatacagaaggcgtcaattggtcccatcgaattaggaggaaaaactgtttcatacagaaggcgtcaattaggaggaaaaactgtttcatacagaaggcgtcaattaggaggaaaaactgtttcatacagaaggcgtcaattggtcccgggacattttgacacccccataatatttttccagaattaacagtataaattgcatctcttgttcaagagttccctatcactctctttaatcactactcacagtaacctcaactcctg

SEQ ID NO: 482 - protein, 212 aa, Homo sapiens
MNSFSTSAFGPVAFSLGLLLVLPAAFPAPVPPGEDSKDVAAPHRQPLTSSERIDKQIRYILDGISALRKETCNKSNMCESSKEALAENNLNLPKMAEKDGCFQSGFNEETCLVKIITGLLEFEVYLEYLQNRFESSEEQARAVQMSTKVLIQFLQKKAKNLDAITTPDPTTNASLLTKLQAQNQWLQDMTTHLILRSFKEFLQSSLRALRQM

SEQ ID NO: 483 - DNA, 57 bp, Homo sapiens
gccacgaacttctctctgttaaagcaagcaggagacgtggaagaaaaccccggtcct

SEQ ID NO: 484 - protein, 326 aa, Homo sapiens
EETRELQSLAAAVVPSAQTLKITDFSFSDFELSDLETALCTIRMFTDLNLVQNFQMKHEVLCRWILSVKKNYRKNVAYHNWRHAFNTAQCMFAALKAGKIQNKLTDLEILALLIAALSHDLDHRGVNNSYIQRSEHPLAQLYCHSIMEHHHFDQCLMILNSPGNQILSGLSIEEYKTTLKIIKQAILATDLALYIKRRGEFFELIRKNQFNLEDPHQKELFLAMLMTACDLSAITKPWPIQQRIAELVATEFFDQGDRERKELNIEPTDLMNREKKNKIPSMQVGFIDAICLQLYEALTHVSEDCFPLLDGCRKNRQKWQALAEQQ

SEQ ID NO: 485 - DNA, 10436 bp, Artificial Sequence
  Synthesized
cggctccggtgcccgtcagtgggcagagcgcacatcgcccacagtccccgagaagttggggggaggggtcggcaattgaaccggtgcctagagaaggtggcgcggggtaaactgggaaagtgatgtcgtgtactggctccgcctttttcccgagggtgggggagaaccgtatataagtgcagtagtcgccgtgaacgttctttttcgcaacgggtttgccgccagaacacaggatccgccaccatggccttaccagtgaccgccttgctcctgccgctggccttgctgctccacgccgccaggccggatatccagatgacccagagcccgagcagcctgagcgcgagcgtgggtgatcgcgtgaccattacctgcagggcaagtcaggacattagtaaatatttaaattggtatcagcagaaaccgggtaaagcgccgaaactgttaatttatcatacatcaagattacactcaggcgtgccgtcgcgttttagcggctcgggttcgggcaccgattttaccctgaccatctcgagcttgcagccggaggacttcgccacctactattgccaacagggtaatacgcttccgtacacgttcggtcagggcaccaaagtggagatcaaaggtggcggtggctcgggcggtggtgggtcgggtggcggcggatctgaggtgcagctggtggagtctgggggaggcttggtacagcctggggggtccctgagactctcctgtgcagcctctggagtgtccctgcctgattatggcgtgtcctgggtccgccaggctccagggaaggggctggagtgggtttcagtgatctggggcagcgagacaacctactacaacagcgccctgaagtcccgattcaccatctccagagacaatgccaagaactcactgtatctgcaaatgaacagcctgagagccgaggacacggctgtgtattactgtgcgaagcactactactacggcggcagctacgctatggactactggggccaaggaaccctggtcaccgtgtcctcaaccacgacgccagcgccgcgaccaccaacaccggcgcccaccatcgcgtcgcagcccctgtccctgcgcccagaggcgtgccggccagcggcggggggcgcagtgcacacgagggggctggacttcgcctgtgatatctacatctgggcgcccttggccgggacttgtggggtccttctcctgtcactggttatcaccctttactgcaaacggggcagaaagaaactcctgtatatattcaaacaaccatttatgagaccagtacaaactactcaagaggaagatggctgtagctgccgatttccagaagaagaagaaggaggatgtgaactgagagtgaagttcagcaggagcgcagacgcccccgcgtaccagcagggccagaaccagctctataacgagctcaatctaggacgaagagaggagtacgatgttttggacaagaggcgtggccgggaccctgagatggggggaaagccgagaaggaagaaccctcaggaaggcctgtacaatgaactgcagaaagataagatggcggaggcctacagtgagattgggatgaaaggcgagcgccggaggggcaaggggcacgatggcctttaccagggtctcagtacagccaccaaggacacctacgacgcccttcacatgcaggccctgccccctcgctaagtcgactctagaactagtaatcaacctctggattacaaaatttgtgaaagattgactggtattcttaactatgttgctccttttacgctatgtggatacgctgctttaatgcctttgtatcatgctattgcttcccgtatggctttcattttctcctccttgtataaatcctggttgctgtctctttatgaggagttgtggcccgttgtcaggcaacgtggcgtggtgtgcactgtgtttgctgacgcaacccccactggttggggcattgccaccacctgtcagctcctttccgggactttcgctttccccctccctattgccacggcggaactcatcgccgcctgccttgcccgctgctggacaggggctcggctgttgggcactgacaattccgtggtgttgtcggggaaatcatcgtcctttccttggctgctcgcctgtgttgccacctggattctgcgcgggacgtccttctgctacgtcccttcggccctcaatccagcggaccttccttcccgcggcctgctgccggctctgcggcctcttccgcgtcttcgccttcgccctcagacgagtcggatctccctttgggccgcctccccgcctgccgcggaattcgagctcggtacctttaagaccaatgacttacaaggcagctgtagatcttagccactttttaaaagaaaaggggggactggaagggctaattcactcccaacgaagacaagatctgctttttgcttgtactgggtctctctggttagaccagatctgagcctgggagctctctggctaactagggaacccactgcttaagcctcaataaagcttgccttgagtgcttcaagtagtgtgtgcccgtctgttgtgtgactctggtaactagagatccctcagacccttttagtcagtgtggaaaatctctagcagtagtagttcatgtcatcttattattcagtatttataacttgcaaagaaatgaatatcagagagtgagaggaacttgtttattgcagcttataatggttacaaataaagcaatagcatcacaaatttcacaaataaagcatttttttcactgcattctagttgtggtttgtccaaactcatcaatgtatcttatcatgtctggctctagctatcccgcccctaactccgcccatcccgcccctaactccgcccagttccgcccattctccgccccatggctgactaattttttttatttatgcagaggccgaggccgcctcggcctctgagctattccagaagtagtgaggaggcttttttggaggcctagggacgtacccaattcgccctatagtgagtcgtattacgcgcgctcactggccgtcgttttacaacgtcgtgactgggaaaaccctggcgttacccaacttaatcgccttgcagcacatccccctttcgccagctggcgtaatagcgaagaggcccgcaccgatcgcccttcccaacagttgcgcagcctgaatggcgaatgggacgcgccctgtagcggcgcattaagcgcggcgggtgtggtggttacgcgcagcgtgaccgctacacttgccagcgccctagcgcccgctcctttcgctttcttcccttcctttctcgccacgttcgccggctttccccgtcaagctctaaatcgggggctccctttagggttccgatttagtgctttacggcacctcgaccccaaaaaacttgattagggtgatggttcacgtagtgggccatcgccctgatagacggtttttcgccctttgacgttggagtccacgttctttaatagtggactcttgttccaaactggaacaacactcaaccctatctcggtctattcttttgatttataagggattttgccgatttcggcctattggttaaaaaatgagctgatttaacaaaaatttaacgcgaattttaacaaaatattaacgcttacaatttaggtggcacttttcggggaaatgtgcgcggaacccctatttgtttatttttctaaatacattcaaatatgtatccgctcatgagacaataaccctgataaatgcttcaataatattgaaaaaggaagagtatgagccatattcaacgggaaacgtcttgctctaggccgcgattaaattccaacatggatgctgatttatatgggtataaatgggctcgcgataatgtcgggcaatcaggtgcgacaatctatcgattgtatgggaagcccgatgcgccagagttgtttctgaaacatggcaaaggtagcgttgccaatgatgttacagatgagatggtcagactaaactggctgacggaatttatgcctcttccgaccatcaagcattttatccgtactcctgatgatgcatggttactcaccactgcgatccccgggaaaacagcattccaggtattagaagaatatcctgattcaggtgaaaatattgttgatgcgctggcagtgttcctgcgccggttgcattcgattcctgtttgtaattgtccttttaacagcgatcgcgtatttcgtctggctcaggcgcaatcacgaatgaataacggtttggttgatgcgagtgattttgatgacgagcgtaatggctggcctgttgaacaagtctggaaagaaatgcataaacttttgccattctcaccggattcagtcgtcactcatggtgatttctcacttgataaccttatttttgacgaggggaaattaataggttgtattgatgttggacgagtcggaatcgcagaccgataccaggatcttgccatcctatggaactgcctcggtgagttttctccttcattacagaaacggctttttcaaaaatatggtattgataatcctgatatgaataaattgcagtttcatttgatgctcgatgagtttttctaactgtcagaccaagtttactcatatatactttagattgatttaaaacttcatttttaatttaaaaggatctaggtgaagatcctttttgataatctcatgaccaaaatcccttaacgtgagttttcgttccactgagcgtcagaccccgtagaaaagatcaaaggatcttcttgagatcctttttttctgcgcgtaatctgctgcttgcaaacaaaaaaaccaccgctaccagcggtggtttgtttgccggatcaagagctaccaactctttttccgaaggtaactggcttcagcagagcgcagataccaaatactgttcttctagtgtagccgtagttaggccaccacttcaagaactctgtagcaccgcctacatacctcgctctgctaatcctgttaccagtggctgctgccagtggcgataagtcgtgtcttaccgggttggactcaagacgatagttaccggataaggcgcagcggtcgggctgaacggggggttcgtgcacacagcccagcttggagcgaacgacctacaccgaactgagatacctacagcgtgagctatgagaaagcgccacgcttcccgaagggagaaaggcggacaggtatccggtaagcggcagggtcggaacaggagagcgcacgagggagcttccagggggaaacgcctggtatctttatagtcctgtcgggtttcgccacctctgacttgagcgtcgatttttgtgatgctcgtcaggggggcggagcctatggaaaaacgccagcaacgcggcctttttacggttcctggccttttgctggccttttgctcacatgttctttcctgcgttatcccctgattctgtggataaccgtattaccgcctttgagtgagctgataccgctcgccgcagccgaacgaccgagcgcagcgagtcagtgagcgaggaagcggaagagcgcccaatacgcaaaccgcctctccccgcgcgttggccgattcattaatgcagctggcacgacaggtttcccgactggaaagcgggcagtgagcgcaacgcaattaatgtgagttagctcactcattaggcaccccaggctttacactttatgcttccggctcgtatgttgtgtggaattgtgagcggataacaatttcacacaggaaacagctatgaccatgattacgccaagcgcgcaattaaccctcactaaagggaacaaaagctggagctgcaagcttaatgtagtcttatgcaatactcttgtagtcttgcaacatggtaacgatgagttagcaacatgccttacaaggagagaaaaagcaccgtgcatgccgattggtggaagtaaggtggtacgatcgtgccttattaggaaggcaacagacgggtctgacatggattggacgaaccactgaattgccgcattgcagagatattgtatttaagtgcctagctcgatacataaacgggtctctctggttagaccagatctgagcctgggagctctctggctaactagggaacccactgcttaagcctcaataaagcttgccttgagtgcttcaagtagtgtgtgcccgtctgttgtgtgactctggtaactagagatccctcagacccttttagtcagtgtggaaaatctctagcagtggcgcccgaacagggacttgaaagcgaaagggaaaccagaggagctctctcgacgcaggactcggcttgctgaagcgcgcacggcaagaggcgaggggcggcgactggtgagtacgccaaaaattttgactagcggaggctagaaggagagagatgggtgcgagagcgtcagtattaagcgggggagaattagatcgcgatgggaaaaaattcggttaaggccagggggaaagaaaaaatataaattaaaacatatagtatgggcaagcagggagctagaacgattcgcagttaatcctggcctgttagaaacatcagaaggctgtagacaaatactgggacagctacaaccatcccttcagacaggatcagaagaacttagatcattatataatacagtagcaaccctctattgtgtgcatcaaaggatagagataaaagacaccaaggaagctttagacaagatagaggaagagcaaaacaaaagtaagaccaccgcacagcaagcggccgctgatcttcagacctggaggaggagatatgagggacaattggagaagtgaattatataaatataaagtagtaaaaattgaaccattaggagtagcacccaccaaggcaaagagaagagtggtgcagagagaaaaaagagcagtgggaataggagctttgttccttgggttcttgggagcagcaggaagcactatgggcgcagcgtcaatgacgctgacggtacaggccagacaattattgtctggtatagtgcagcagcagaacaatttgctgagggctattgaggcgcaacagcatctgttgcaactcacagtctggggcatcaagcagctccaggcaagaatcctggctgtggaaagatacctaaaggatcaacagctcctggggatttggggttgctctggaaaactcatttgcaccactgctgtgccttggaatgctagttggagtaataaatctctggaacagatttggaatcacacgacctggatggagtgggacagagaaattaacaattacacaagcttaatacactccttaattgaagaatcgcaaaaccagcaagaaaagaatgaacaagaattattggaattagataaatgggcaagtttgtggaattggtttaacataacaaattggctgtggtatataaaattattcataatgatagtaggaggcttggtaggtttaagaatagtttttgctgtactttctatagtgaatagagttaggcagggatattcaccattatcgtttcagacccacctcccaaccccgaggggacccgacaggcccgaaggaatagaagaagaaggtggagagagagacagagacagatccattcgattagtgaacggatctcgacggtatcgatcacgagactagcctcgacacaaatggcagtattcatccacaattttaaaagaaaaggggggattggggggtacagtgcaggggaaagaatagtagacataatagcaacagacatacaaactaaagaattacaaaaacaaattacaaaaattcaaaattttcgggtttattacagggacagcagagatccagtttatcgacttaacttgtttattgcagcttataatggttacaaataaggcaatagcatcacaaatttcacaaataaggcatttttttcactgcattctagttttggtttgtccaaactcatcaatgtatcttatcatgtctggatctcaaatccctcggaagctgcgcctgtcttaggttggagtgatacatttttatcacttttacccgtctttggattaggcagtagctctgacggccctcctgtcttaggttagtgaaaaatgtcactctcttacccgtcattggctgtccagcttagctcgcaggggaggtggtctcagtcgttggagccgaagtccagagagatgatggtgtctccagcggcgggggccagcagtgtcagagcatcgggctccttcttcagcttgtcaaacagagagctggtgtcctcgctctccaccttggtgaagagctgggtcatcttcatgtcgctgctctccacgggcttcagcacgcactcggtctgctgcagagagaagatcagatcgtgctggatgattcctctggcagcggcctctctagcagcggcttcgctggcgttcaggtagctcatcacccggtcgatggtcacggcccggatccggaaggcatgcaggaggatgcacagcttgatcttggtcttgtagaagtcgggctcttccaggctggacttctggggcactgtctcgctgttgaagttcagggcctgcatcagctcgtcgatcacggccagcatgttctgatccaggaagatctgccgcttggggtccatcagcagcttggcgttcatggtcttgaactccacctggtacatcttcaggtcctcgtagatgctgctcaggcacagggccatcatgaagctggtctttctgctggccaggcaagagccgttggtgatgaagcttgtctcccgagagttcagacagctctcgttcttggtcagttccaggggcaggcaggcctccacggtgctggtcttatccttggtgatgtcctcgtggtcgatttcctcgctggtgcaggggtagaattccagggtctgccgggccttctgcagcatgttgctcacggcccgcagcaggttctggctgtggtgcaggcaggggaacatgccggggtcgggggtagccacgggcaggttccggcttcctccgccccctccgccgctgcagggcacgctggcccactcggaccaggagctgctgtagtaccggtcctgggcccgcacgctgatgctggcgttcttccggcagatcacggtggcgctggtcttgtcggtgaacacccggtctttcttctcccgcttgctcttgccctgcacctgcacacagaaggtcaggctgaagtagctgtggggggtggaccaggtgtcagggtactcccaggacacctccacctgccggctgttcttcaggggcttcagctgcaggttcttgggggggtcgggcttgatgatgtcccggatgaaaaagctggaggtgtagttctcgtacttcagcttgtgcacggcgtccaccatcacctcgatgggcaggctttcctcggcggcagggcaggcgctatcttcctggcactcgacgctgtactcgtactctttgttgtcgccccgcactctctcggcgctcagggtggcggctccgcaggtcacgccctgagggtcgctgctgccccggctgctcttcacgctgaaggtcaggtcggtgctgatggtggtcagccaccaacaggtgaaccggccgctgtagttcttggcctcgcaccgcaggaaggtcttgttcttgggctctttctggtccttcaggatgtcggtggaccagatgccatcctctttcttgtgcagcagcagcaggctgtgggacagcacttcgccgcccttgtggcaggtgtactggccggcgtcgccgaactctttgacctggatggtcagggtcttgccgctgcccagcacctcgctgctctggtccagggtccaggtgatgccgtcctcttcgggggtgtcgcaggtcagcaccaccatctcgccaggggcgtcgggataccagtccagctccaccacgtacacgtctttcttcagctcccagatggccaccagggggctggccaggaacaccaggctgaaccagctgatgaccagctgctgatgacacatggtggccaggagttgaggttactgtgagtagtgattaaagagagtgatagggaactcttgaacaagagatgcaatttatactgttaattctggaaaaatattatgggggtgtcaaaatgtcccgggaccaattgacgccttctgtatgaaacagtttttcctcctaattgacgccttctgtatgaaacagtttttcctcctaattgacgccttctgtatgaaacagtttttcctcctaattcgatgggaccaattgacgccttctgtatgaaacagtttttcctcctaattgacgccttctgtatgaaacagtttttcctcctaattgacgccttctgtatgaaacagtttttcctcctaattcgatatcaagcttatcgataccgtcgacctcgatgaattcgctagcaaatccactttggctcgagaagcttgatat

SEQ ID NO: 486 - protein, 219 aa, Homo sapiens
MCPARSLLLVATLVLLDHLSLARNLPVATPDPGMFPCLHHSQNLLRAVSNMLQKARQTLEFYPCTSEEIDHEDITKDKTSTVEACLPLELTKNESCLNSRETSFITNGSCLASRKTSFMMALCLSSIYEDLKMYQVEFKTMNAKLLMDPKRQIFLDQNMLAVIDELMQALNFNSETVPQKSSLEEPDFYKTKIKLCILLHAFRIRAVTIDRVMSYLNAS

SEQ ID NO: 487 - protein, 74 aa, Artificial Sequence
  Synthesized
GIIQHDLIFSLQQTECVLKPVESSDMKMTQLFTKVESEDTSSLFDKLKKEPDALTLLAPAAGDTIISLDFGSND

SEQ ID NO: 488 - protein, 485 aa, Artificial Sequence
  Synthesized
MALPVTALLLPLALLLHAARPEIVMTQSPATLSVSPGERATLSCRASQSVSRNLAWYQQKPGQAPRLLIYGASTRATGIPARFSGSGSGTEFTLTIGSLQSEDFAVYYCQQYKTWPRTFGQGTNVEIKGGGGSGGGGSGGGGSQVQLQQWGAGLLKPSETLSLTCAVFGGSFSGYYWSWIRQPPGKGLEWIGEINHRGNTNDNPSLKSRVTISVDTSKNQFALKLSSVTAADTAVYYCARERGYTYGNFDHWGQGTLVTVSSAKPTTTPAPRPPTPAPTIASQPLSLRPEACRPAAGGAVHTRGLDFACDIYIWAPLAGTCGVLLLSLVITKRGRKKLLYIFKQPFMRPVQTTQEEDGCSCRFPEEEEGGCELRVKFSRSADAPAYKQGQNQLYNELNLGRREEYDVLDKRRGRDPEMGGKPRRKNPQEGLYNELQKDKMAEAYSEIGMKGERRRGKGHDGLYQGLSTATKDTYDALHMQALPPR

SEQ ID NO: 489 - protein, 264 aa, Artificial Sequence
  Synthesized
MALPVTALLLPLALLLHAARPQSVLTQPASVSGSPGQSVTISCTGTSSDVGGYNYVSWYQQHPGKPPKLMIYEVSKRPSGVPDRFSGSKSGNTASLTISGLQAEDEADYYCSSHTSSNTLIFGGGTKVTVLGGGGSGGGGSGGGGSEVQLVQSGAEVKKPGESLKISCKGSGYTFTNYWIGWVRQMPGKGLEWMGRIYPSDSYTNYSPSFQGQVTISADKSISTAYLQWSSLKASDTAMYYCARDLEPTHHYSWGQGTLVTVSS

SEQ ID NO: 490 - protein, 267 aa, Artificial Sequence
  Synthesized
MALPVTALLLPLALLLHAARPDIVMTQSPSSLTVTAGEKVTMSCKSSQSLLNSGNQKNYLTWYQQKPGQPPKLLIYWASTRESGVPDRFTGSGSGTDFTLTISSVQAEDLAVYYCQNDYSYPLTFGAGTKLELKGGGGSGGGGSGGGGSQIQLVQSGPELKKPGETVKISCKASGYTFTNYGMNWVKQAPGKGLKWMGWINTNTGEPTYAEEFKGRFAFSLETSASTAYLQINNLKNEDTATYFCARLGFGNAMDYWGQGTSVTVSS

SEQ ID NO: 491 - protein, 264 aa, Artificial Sequence; identical to SEQ ID NO: 489
  Synthesized

SEQ ID NO: 492 - protein, 754 aa, Artificial Sequence; identical to SEQ ID NO: 454
  Synthesized

SEQ ID NO: 493 - protein, 753 aa, Artificial Sequence
  Synthesized
MALPVTALLLPLALLLHAARPQSVLTQPPSVSAAPGQKVTISCSGSSSDIGSNYVSWYQQFPGTAPKLLIYDNNKRPSAIPDRFSGSKSGTSATLGITGLQTGDEADYYCGTWDSRLGIAVFGGGTQLTVLGGGGGSGGGGSGGGGSEVQLVQSGAEVKKPGQSLKISCKASGYSLTDNWIGWVRQKPGKGLEWMGIIYPGDSDTRYSPSFQGQVTISADKSINTAYLQWSSLKASDTAIYYCVGLDWNYNPLRYWGPGTLVTVSSGGGGSGGGGSGGGGSGGGGSDIVMTQSPSSLTVTAGEKVTMICKSSQSLLNSGDQKNYLTWYQQKPGQPPKLLIFWASTRESGVPDRFTGSGSGTDFTLTISSVQAEDLAVYYCQNDYSYPLTFGAGTKLELKGGGGSGGGGSGGGGSQVQLQQSDAELVKPGSSVKISCKASGYTFTDHAIHWVKQKPEQGLEWIGHFSPGNTDIKYNDKFKGKATLTVDRSSSTAYMQLNSLTSEDSAVYFCKTSTFFFDYWGQGTTLTVSSTTTPAPRPPTPAPTIASQPLSLRPEACRPAAGGAVHTRGLDFACDIYIWAPLAGTCGVLLLSLVITLYCKRGRKKLLYIFKQPFMRPVQTTQEEDGCSCRFPEEEEGGCELRVKFSRSADAPAYQQGQNQLYNELNLGRREEYDVLDKRRGRDPEMGGKPRRKNPQEGLYNELQKDKMAEAYSEIGMKGERRRGKGHDGLYQGLSTATKDTYDALHMQALPPR

SEQ ID NO: 494 - protein, 753 aa, Artificial Sequence
  Synthesized
MALPVTALLLPLALLLHAARPDIVMTQSPSSLTVTAGEKVTMICKSSQSLLNSGDQKNYLTWYQQKPGQPPKLLIFWASTRESGVPDRFTGSGSGTDFTLTISSVQAEDLAVYYCQNDYSYPLTFGAGTKLELKGGGGSGGGGSGGGGSQVQLQQSDAELVKPGSSVKISCKASGYTFTDHAIHWVKQKPEQGLEWIGHFSPGNTDIKYNDKFKGKATLTVDRSSSTAYMQLNSLTSEDSAVYFCKTSTFFFDYWGQGTTLTVSSGGGGSGGGGSGGGGSGGGGSQSVLTQPPSVSAAPGQKVTISCSGSSSDIGSNYVSWYQQFPGTAPKLLIYDNNKRPSAIPDRFSGSKSGTSATLGITGLQTGDEADYYCGTWDSRLGIAVFGGGTQLTVLGGGGGSGGGGSGGGGSEVQLVQSGAEVKKPGQSLKISCKASGYSLTDNWIGWVRQKPGKGLEWMGIIYPGDSDTRYSPSFQGQVTISADKSINTAYLQWSSLKASDTAIYYCVGLDWNYNPLRYWGPGTLVTVSSTTTPAPRPPTPAPTIASQPLSLRPEACRPAAGGAVHTRGLDFACDIYIWAPLAGTCGVLLLSLVITLYCKRGRKKLLYIFKQPFMRPVQTTQEEDGCSCRFPEEEEGGCELRVKFSRSADAPAYQQGQNQLYNELNLGRREEYDVLDKRRGRDPEMGGKPRRKNPQEGLYNELQKDKMAEAYSEIGMKGERRRGKGHDGLYQGLSTATKDTYDALHMQALPPR

SEQ ID NO: 495 - protein, 750 aa, Artificial Sequence
  Synthesized
MALPVTALLLPLALLLHAARPQSVLTQPASVSGSPGQSVTISCTGTSSDVGGYNYVSWYQQHPGKPPKLMIYEVSKRPSGVPDRFSGSKSGNTASLTISGLQAEDEADYYCSSHTSSNTLIFGGGTKVTVLGGGGSGGGGSGGGGSEVQLVQSGAEVKKPGESLKISCKGSGYTFTNYWIGWVRQMPGKGLEWMGRIYPSDSYTNYSPSFQGQVTISADKSISTAYLQWSSLKASDTAMYYCARDLEPTHHYSWGQGTLVTVSSGGGGSGGGGSGGGGSGGGGSDIVMTQSPSSLTVTAGEKVTMICKSSQSLLNSGDQKNYLTWYQQKPGQPPKLLIFWASTRESGVPDRFTGSGSGTDFTLTISSVQAEDLAVYYCQNDYSYPLTFGAGTKLELKGGGGSGGGGSGGGGSQVQLQQSDAELVKPGSSVKISCKASGYTFTDHAIHWVKQKPEQGLEWIGHFSPGNTDIKYNDKFKGKATLTVDRSSSTAYMQLNSLTSEDSAVYFCKTSTFFFDYWGQGTTLTVSSAAAIEVMYPPPYLDNEKSNGTIIHVKGKHLCPSPLFPGPSKPFWVLVVVGGVLACYSLLVTVAFIIFWVRSKRSRLLHSDYMNMTPRRPGPTRKHYQPYAPPRDFAAYRSRVKFSRSADAPAYQQGQNQLYNELNLGRREEYDVLDKRRGRDPEMGGKPRRKNPQEGLYNELQKDKMAEAYSEIGMKGERRRGKGHDGLYQGLSTATKDTYDALHMQALPPR

SEQ ID NO: 496 - protein, 750 aa, Artificial Sequence
  Synthesized
MALPVTALLLPLALLLHAARPQSVLTQPASVSGSPGQSVTISCTGTSSDVGGYNYVSWYQQHPGKPPKLMIYEVSKRPSGVPDRFSGSKSGNTASLTISGLQAEDEADYYCSSHTSSNTLIFGGGTKVTVLGGGGSGGGGSGGGGSEVQLVQSGAEVKKPGESLKISCKGSGYTFTNYWIGWVRQMPGKGLEWMGRIYPSDSYTNYSPSFQGQVTISADKSISTAYLQWSSLKASDTAMYYCARDLEPTHHYSWGQGTLVTVSSGGGGSGGGGSGGGGSGGGGSQVQLQQSDAELVKPGSSVKISCKASGYTFTDHAIHWVKQKPEQGLEWIGHFSPGNTDIKYNDKFKGKATLTVDRSSSTAYMQLNSLTSEDSAVYFCKTSTFFFDYWGQGTTLTVSSGGGGSGGGGSGGGGSDIVMTQSPSSLTVTAGEKVTMICKSSQSLLNSGDQKNYLTWYQQKPGQPPKLLIFWASTRESGVPDRFTGSGSGTDFTLTISSVQAEDLAVYYCQNDYSYPLTFGAGTKLELKAAAIEVMYPPPYLDNEKSNGTIIHVKGKHLCPSPLFPGPSKPFWVLVVVGGVLACYSLLVTVAFIIFWVRSKRSRLLHSDYMNMTPRRPGPTRKHYQPYAPPRDFAAYRSRVKFSRSADAPAYQQGQNQLYNELNLGRREEYDVLDKRRGRDPEMGGKPRRKNPQEGLYNELQKDKMAEAYSEIGMKGERRRGKGHDGLYQGLSTATKDTYDALHMQALPPR

SEQ ID NO: 497 - protein, 750 aa, Artificial Sequence
  Synthesized
MALPVTALLLPLALLLHAARPDIVMTQSPSSLTVTAGEKVTMICKSSQSLLNSGDQKNYLTWYQQKPGQPPKLLIFWASTRESGVPDRFTGSGSGTDFTLTISSVQAEDLAVYYCQNDYSYPLTFGAGTKLELKGGGGSGGGGSGGGGSQVQLQQSDAELVKPGSSVKISCKASGYTFTDHAIHWVKQKPEQGLEWIGHFSPGNTDIKYNDKFKGKATLTVDRSSSTAYMQLNSLTSEDSAVYFCKTSTFFFDYWGQGTTLTVSSGGGGSGGGGSGGGGSGGGGSQSVLTQPASVSGSPGQSVTISCTGTSSDVGGYNYVSWYQQHPGKPPKLMIYEVSKRPSGVPDRFSGSKSGNTASLTISGLQAEDEADYYCSSHTSSNTLIFGGGTKVTVLGGGGSGGGGSGGGGSEVQLVQSGAEVKKPGESLKISCKGSGYTFTNYWIGWVRQMPGKGLEWMGRIYPSDSYTNYSPSFQGQVTISADKSISTAYLQWSSLKASDTAMYYCARDLEPTHHYSWGQGTLVTVSSAAAIEVMYPPPYLDNEKSNGTIIHVKGKHLCPSPLFPGPSKPFWVLVVVGGVLACYSLLVTVAFIIFWVRSKRSRLLHSDYMNMTPRRPGPTRKHYQPYAPPRDFAAYRSRVKFSRSADAPAYQQGQNQLYNELNLGRREEYDVLDKRRGRDPEMGGKPRRKNPQEGLYNELQKDKMAEAYSEIGMKGERRRGKGHDGLYQGLSTATKDTYDALHMQALPPR

SEQ ID NO: 498 - protein, 750 aa, Artificial Sequence
  Synthesized
MALPVTALLLPLALLLHAARPDIVMTQSPSSLTVTAGEKVTMICKSSQSLLNSGDQKNYLTWYQQKPGQPPKLLIFWASTRESGVPDRFTGSGSGTDFTLTISSVQAEDLAVYYCQNDYSYPLTFGAGTKLELKGGGGSGGGGSGGGGSQVQLQQSDAELVKPGSSVKISCKASGYTFTDHAIHWVKQKPEQGLEWIGHFSPGNTDIKYNDKFKGKATLTVDRSSSTAYMQLNSLTSEDSAVYFCKTSTFFFDYWGQGTTLTVSSGGGGSGGGGSGGGGSGGGGSEVQLVQSGAEVKKPGESLKISCKGSGYTFTNYWIGWVRQMPGKGLEWMGRIYPSDSYTNYSPSFQGQVTISADKSISTAYLQWSSLKASDTAMYYCARDLEPTHHYSWGQGTLVTVSSGGGGSGGGGSGGGGSQSVLTQPASVSGSPGQSVTISCTGTSSDVGGYNYVSWYQQHPGKPPKLMIYEVSKRPSGVPDRFSGSKSGNTASLTISGLQAEDEADYYCSSHTSSNTLIFGGGTKVTVLAAAIEVMYPPPYLDNEKSNGTIIHVKGKHLCPSPLFPGPSKPFWVLVVVGGVLACYSLLVTVAFIIFWVRSKRSRLLHSDYMNMTPRRPGPTRKHYQPYAPPRDFAAYRSRVKFSRSADAPAYQQGQNQLYNELNLGRREEYDVLDKRRGRDPEMGGKPRRKNPQEGLYNELQKDKMAEAYSEIGMKGERRRGKGHDGLYQGLSTATKDTYDALHMQALPPR

SEQ ID NO: 499 - protein, 265 aa, Artificial Sequence
  Synthesized
MSPAQFLFLLVLWIQETNGDVVMTQTPLTLSVTIGQPASISCKSSQSLLYSNGKTYLNWLLQRPGQSPKRLIYLVSKLDSGVPDRFTGSGSGTDFTLKISRVEAEDLGVYYCVQGTHFPHTFGGGTKLEIKRMNFGLSLIFLVLVLKGVQCEVKVVESGGGLVKPGASLKLSCAASGFTFSNYGMSWVRQTSDKRLEWVASISSGGDSTFYADNVKGRFTISRENAKNTLYLQMSSLKSEDTALYYCARDDLFNWGQGTTLTVSS

SEQ ID NO: 500 - protein, 254 aa, Artificial Sequence
  Synthesized
VTPSQTLSLTCAISGDSVSSNSATWNWIRQSPSRGLEWLGRTYYRSKWYNDYAVSVKSRMSINPDTSKNQFSLQLNSVTPEDTAVYYCARGMMTYYYGMDVWGQGTTVTVSSGILGSGGGGSGGGGSGGGGSQPVLTQSSSLSASPGASASLYHRCTLRSGINVGPYRIYWYQQSYSPGSPPQYLLNYKSDSDKQQGSGVPSRFSGSKDASANAGVLLISGLRSEDEADYYCMIWHSSAAVFGGGTQLTVLSAS

SEQ ID NO: 501 - protein, 262 aa, Artificial Sequence
  Synthesized
MVLLVTSLLLCELPHPAFLLIPDIQMTQSPSSLSASVGDRVTITCRASQGIRNNLAWYQQKPGKAPKRLIYAASNLQSGVPSRFTGSGSGTEFTLIVSSLQPEDFATYYCLQHHSYPLTSGGGTKVEIKRTGSTSGSGKPGSGEGSEVQVLESGGGLVQPGGSLRLSCAASGFTFSSYAMSWVRQAPGKGLEWVSAISGSGGSTNYADSVKGRFTISRDNSKNTLYLQMNSLRAEDTAVYYCAGSSGWSEYWGQGTLVTVSS

SEQ ID NO: 502 - protein, 263 aa, Artificial Sequence
  Synthesized
MGWSCIILFLVATATGVHSDIQLTQSPSSLSASVGDRVTITCKASQDVGTSVAWYQQKPGKAPKLLIYWTSTRHTGVPSRFSGSGSGTDFTFTISSLQPEDIATYYCQQYSLYRSFGQGTKVEIKRGGSGSGGSGSGGSGSEVQLVESGGGVVQPGRSLRLSCSASGFDFTTYWMSWVRQAPGKGLEWIGEIHPDSSTINYAPSLKDRFTISRDNAKNTLFLQMDSLRPEDTGVYFCASLYFGFPWFAYWGQGTPVTVSSAKP

SEQ ID NO: 503 - protein, 311 aa, Artificial Sequence
  Synthesized
DVVMTQSPLSLPVTPGEPASISCRSSQSLVHSNANTYLHWYLQKPGQSPQLLIYKVSNRFSGVPDRFSGSGSGTDFTLKISRVGAGDVGVYYCSQNTHVPPTFGQGTKLEIKRGGGGSGGGGSGGGGSQVQLVQSGAEVKKPGASVKVSCKASGYTFTDYEMHWVRQAPGQGLEWMGALDPKTGDTAYSQKFKGRVTLTADESTSTAYMELSSLRSEDTAVYYCTRFYSYTYWGQGTLVTVSSTTTPAPRPPTPAPTIASQPLSLRPEACRPAAGGAVHTRGLDFALECDFWVLVVVGGVLACYSLLVTVA

SEQ ID NO: 504 - protein, 343 aa, Artificial Sequence
  Synthesized
GPVPPSTALRYLIEELVNITQNQKAPLCNGSMVWSINLTAGMYCAALESLINVSGCSAIEKTQRMLSGFCPHKVSAGQFSSLHVRDTKIEVAQFVKDLLLHLKKLFREGRFNESKYGPPCPPCPAPEFEGGPSVFLFPPKPKDTLMISRTPEVTCVVVAKDVSQEDPEVQFNWYVDVVEVHNAKTKPREEQFQSTYRVVSVLTVLHQDWLNGKEYKCKVSNKGLPSSIEKTISKAKGQPREPQVYTLPPSQEEMTKNQVSLTCLVKGFYPSDIAVEWESNGQPENNYKTTPPVLDSDGSFFLYSRLTVDKSRWQEGNVFSCSVMHEALHNHYTQKSLSLSLGK

1-24. (canceled)

25. A method for preparing a mixed population of modified cells, the method comprising: contacting cells with (i) a first vector comprising a polynucleotide encoding a first antigen binding molecule that binds a first antigen and (ii) a second vector comprising a polynucleotide encoding a second antigen binding molecule that binds a second antigen to obtain a mixed population of modified cells, wherein the first antigen binding molecule binds a cell surface molecule of a B cell and the second antigen binding molecule binds a solid tumor antigen, and wherein the cells are T cells, natural killer (NK) cells, or dendritic cells.

26. The method of claim 25, wherein the cells are T cells.

27. The method of claim 25, wherein the mixed population of modified cells comprises modified cells comprising the first antigen binding molecule, modified cells comprising the second antigen binding molecule, and modified cells comprising the first and second antigen binding molecules.

28. The method of claim 25, wherein the first and second antigen binding molecules are chimeric antigen receptors (CARs).

29. The method of claim 28, wherein the CARs comprise an extracellular domain, a transmembrane domain, and an intracellular domain.

30. The method of claim 29, wherein the intracellular domain comprises a co-stimulatory domain comprising an intracellular domain of CD27, CD28, 4-1BB, OX40, CD30, CD40, PD-1, ICOS, lymphocyte function-associated antigen-1 (LFA-1), CD2, CD7, LIGHT, NKG2C, B7-H3, or a combination thereof.

31. The method of claim 29, wherein the intracellular domain comprises a CD3 zeta signaling domain.

32. The method of claim 25, wherein the first antigen comprises CD19, CD22, CD20, BCMA, CD5, CD7, CD2, CD16, CD56, CD30, CD14, CD68, CD11b, CD18, CD169, CD1c, CD33, CD38, CD138, or CD13.

33. The method of claim 25, wherein the first antigen comprises CD19, CD22, CD20, or BCMA.

34. The method of claim 25, wherein the first antigen binding molecule comprises amino acid sequence SEQ ID NO: 5.

35. The method of claim 33, wherein the second antigen comprises tMUC1, PRLR, CLCA1, MUC12, GUCY2C, GPR35, CR1L, MUC 17, TMPRSS11B, MUC21, TMPRSS11E, CD207, SLC30A8, CFC1, SLC12A3, SSTR1, GPR27, FZD10, TSHR, SIGLEC15, SLC6A3, KISS1R, QRFPR, GPR119, CLDN6, UPK2, ADAM12, SLC45A3, ACPP, MUC21, MUC16, MS4A12, ALPP, CEA, EphA2, FAP, GPC3, IL13-Rα2, Mesothelin, PSMA, ROR1, VEGFR-II, GD2, FR-α, ErbB2, EpCAM, EGFRvIII, CLDN18.2, or EGFR.

36. The method of claim 34, wherein the second antigen binding molecule comprises amino acid sequence SEQ ID NO: 70, 8, or 11.

37. The method of claim 25, wherein the mixed population of modified cells comprises a dominant negative variant of a receptor of programmed death 1 (PD-1), cytotoxic T lymphocyte antigen-4 (CTLA-4), B- and T-lymphocyte attenuator (BTLA), T cell immunoglobulin mucin-3 (TIM-3), lymphocyte-activation protein 3 (LAG-3), T cell immunoreceptor with Ig and ITIM domains (TIGIT), leukocyte-associated immunoglobulin-like receptor 1 (LAIRI), natural killer cell receptor 2B4 (2B4), or CD 160.

38. The method of claim 25, wherein the first binding molecule is a CAR, and the second binding molecule is a modified TCR.

39. The method of claim 25, wherein the mixed population of modified cells comprises a polynucleotide encoding a therapeutic agent comprising IL12, IL6, and/or INFγ.

40. The method of claim 1, wherein the first and second vectors comprise lentiviral vectors.

41. A composition comprising a mixed population of modified cells, wherein the mixed population of modified cells comprises (i) modified cells comprising a first vector comprising a polynucleotide encoding a first antigen binding molecule that binds a first antigen; (ii) modified cells comprising a second vector comprising a polynucleotide encoding a second antigen binding molecule that binds a second antigen; and (iii) modified cells comprising the first and second vector; wherein the first antigen binding molecule binds a cell surface molecule of a B cell and the second antigen binding molecule binds a solid tumor antigen, and wherein the modified cells are T cells, natural killer (NK) cells, or dendritic cells.

42. The composition of claim 41, wherein the composition comprises a mixed population of modified cells, wherein the mixed population of modified cells comprises modified cells comprising the first antigen binding molecule, modified cells comprising the second antigen binding molecule, and modified cells comprising the first and second antigen binding molecules.

43. The composition of claim 41, wherein the first and second antigen binding molecules comprise CARs.

44. The composition of claim 43, wherein the CARs comprise an extracellular domain, a transmembrane domain, and an intracellular domain.

45. The composition of claim 44, wherein the intracellular domain comprises a co-stimulatory domain comprising an intracellular domain of CD27, CD28, 4-1BB, OX40, CD30, CD40, PD-1, ICOS, lymphocyte function-associated antigen-1 (LFA-1), CD2, CD7, LIGHT, NKG2C, B7-H3, or a combination thereof.

46. The composition of claim 44, wherein the intracellular domain comprises a CD3 zeta signaling domain.

47. The composition of claim 41, wherein the first antigen comprises CD19, CD22, CD20, BCMA, CD5, CD7, CD2, CD16, CD56, CD30, CD14, CD68, CD11b, CD18, CD169, CD1c, CD33, CD38, CD138, or CD13.

48. The composition of claim 41, wherein the first antigen comprises CD19, CD22, CD20, or BCMA.

49. The composition of claim 41, wherein the first antigen binding molecule comprises amino acid sequence SEQ ID NO: 5.

50. The composition of claim 41, wherein the second antigen comprises tMUC1, PRLR, CLCA1, MUC12, GUCY2C, GPR35, CR1L, MUC 17, TMPRSS11B, MUC21, TMPRSS11E, CD207, SLC30A8, CFC1, SLC12A3, SSTR1, GPR27, FZD10, TSHR, SIGLEC15, SLC6A3, KISS1R, QRFPR, GPR119, CLDN6, UPK2, ADAM12, SLC45A3, ACPP, MUC21, MUC16, MS4A12, ALPP, CEA, EphA2, FAP, GPC3, IL13-Rα2, Mesothelin, PSMA, ROR1, VEGFR-II, GD2, FR-α, ErbB2, EpCAM, EGFRvIII, CLDN18.2, or EGFR.

51. The composition of claim 41, wherein the second antigen binding molecule comprises amino acid sequence SEQ ID NO: 70, 8, or 11.

52. The composition of claim 41, wherein the mixed population of modified cells comprises a dominant negative variant of a receptor of programmed death 1 (PD-1), cytotoxic T lymphocyte antigen-4 (CTLA-4), B- and T-lymphocyte attenuator (BTLA), T cell immunoglobulin mucin-3 (TIM-3), lymphocyte-activation protein 3 (LAG-3), T cell immunoreceptor with Ig and ITIM domains (TIGIT), leukocyte-associated immunoglobulin-like receptor 1 (LAIRI), natural killer cell receptor 2B4 (2B4), or CD 160.

53. The composition of claim 41, wherein the first binding molecule is a CAR, and the second binding molecule is a modified TCR.

54. The composition of claim 41, wherein the mixed population of modified cells comprises a polynucleotide encoding a therapeutic agent comprising IL12, IL6, and/or INFγ.

55. The composition of claim 41, wherein the first and second vectors comprise lentiviral vectors.

56. The composition of claim 41, wherein the modified cells are T cells.

57. The composition of claim 41, wherein the composition is a pharmaceutical composition.
